(19) United States
(12) Patent Application Publication
(10) Pub. No.: US 2025/0255985 A1
(43) Pub. Date: Aug. 14, 2025

(54) PARVOVIRUS ITR-BASED GENE DELIVERY VECTOR SYSTEM

(71) Applicant: ModeX Therapeutics, Inc., Weston, MA (US)

(72) Inventors: Xiangmudong KONG, Boston, MA (US); Nicholas Edward JONES, Northborough, MA (US); Leon BROWN, Spencer, MA (US); Gary J. NABEL, Delray Beach, FL (US); Zhi-yong YANG, Newton Center, MA (US)

(21) Appl. No.: 19/051,107

(22) Filed: Feb. 11, 2025

Related U.S. Application Data
(60) Provisional application No. 63/552,575, filed on Feb. 12, 2024.

(51) Int. Cl. A61K 48/00; A61K 47/68; A61K 47/69; C12N 15/86; C12N 15/88

(52) U.S. Cl. CPC A61K 48/0041; A61K 47/6879; A61K 47/6913; C12N 15/86; C12N 15/88; C12N 2750/14143; C12N 2830/50

(57) ABSTRACT

The present disclosure provides an AAV-ITR based gene delivery system comprising (i) an AAV-ITR vector comprising a double stranded polynucleotide encoding a gene of interest flanked by ITRs and (ii) a Rep vector comprising an mRNA encoding a Rep protein such as Rep78, wherein both vectors are encapsulated, e.g., in a liposome or LNP. Such a combination of ITR vector with the expression of Rep68/78 results in amplification of the AAV-ITR vector and enhanced episomal maintenance of the vector in the cells, which provides the base for sustained transgene expression. The liposomes containing the AAV-ITR vector and Rep vector components of the gene delivery system can be targeted to one or more surface proteins on a targeted cell or tissue. The gene of interest can be, for example, chimeric antigen receptors (CAR), or antibodies. Also provided are pharmaceutical compositions, vectors, lipid compositions, kits, and methods of treatment.

### CROSS-REFERENCE TO RELATED APPLICATIONS AND INCORPORATION BY REFERENCE

[0001] This application claims the priority benefit of U.S. Provisional Application No. 63/552,575, filed on Feb. 12, 2024, which is herein incorporated by reference in its entirety.

### REFERENCE TO SEQUENCE LISTING SUBMITTED ELECTRONICALLY

[0002] The content of the electronically submitted ST.26 sequence listing in XML format (Name 4850_0190002_SequenceListing_ST26.xml; Size: 2,104,957 bytes; and Date of Creation: Feb. 11, 2025) filed with the application is incorporated herein by reference in its entirety.

### FIELD

[0003] The present disclosure relates to gene transfer system utilizing Parvovirus ITR elements in combination with suitable delivery methods to administer payloads of a nucleic acid of interest that codes for therapeutic polypeptides to cells in eukaryotic subjects.

### BACKGROUND

[0004] Parvoviruses are a family of mammalian viruses including the human Adeno-associated viruses (AAV). Their single-stranded DNA (ssDNA) genomes is flanked by Inverted Terminal Repeat (ITR) at each end that form into hairpin loops that are important for viral life cycle including replication, viral packaging and gene expression. AAV vectors have been utilized for years in research and in development of the transfer of genetic material coding for genes of interest into subjects that need treatment thereof. Gene therapy strives to correct genes that are defective, and which are associated with or responsible for an underlying disease or condition. AAVs are comparatively small, single stranded DNA viruses which require helper virus for efficient replication. The genome of AAV is 4.7 kb and is characterized by two ITR and two open reading frames (ORF) which encode Rep proteins and Cap proteins. The ORF encoding the Rep protein encodes four proteins having molecular weights of 78 kD, 68 kD, 52 kD and 40 kD. The Rep proteins are responsible for regulating AAV replication and integration.

[0005] Gene transfer technology is the key component of transformative medical intervention such as gene therapy. Recombinant viral vectors based on AAVs and lentivirus are the main gene transfer technologies currently being used in gene therapies. Viral vector systems generally have intrinsic technical and biological hurdles such as insert capacity, industrial scale manufacturability, host immunogenicity against viral vector and complications from high dose delivery. Non-viral gene delivery is preferred, but current technologies lack robustness in gene transfer efficiency and only allow for short-term gene expression. Recent progress in mRNA/LNP delivery technology may provide a path forward, albeit a technology to provide sustainable gene expression is required.

[0006] To develop a non-viral vector system for long-term gene expression, it is essential to use host cellular machineries for replication/transcription/translation and avoid permanent presence of viral protein that can induce immuno-response resulting in the elimination of transduced cells by host immune system. The avoidance of an immune response in a gene transfer system remains an unmet medical need. The present inventors have discovered a system that maintains the long-term expression of genes and other proteins of interest to be used as successful therapeutics in humans.

[0007] U.S. Pat. No. 7,186,552 discloses the nucleic acid sequences of AAV serotype 1 and vectors and host cells containing these sequences and functional fragments thereof. This patent discloses a recombinant vector comprising an AAV-1 ITR and a selected transgene with the vector comprising both the 5′ and 3′ AAV-1 ITRs between which the transgene is located. This patent discloses host cells stably transduced with an AAV-1 P5 promoter. U.S. Pat. No. 9,598,703 discloses isolated, linear capsid-free nucleic acid molecules which comprise a first AAV ITR, a nucleotide sequence of interest (NSI or GOI) and a second AAV ITR wherein the nucleic acid molecule is devoid of AAV capsid protein coding sequences. This patent discloses that the nucleotide sequence of interest can be an expression cassette of an exogenous DNA. The isolated linear capsid-free nucleic acid molecule is described therein as single-stranded. WO 2016/134337 discloses site-specific integrating recombinant AAV vectors for gene therapy.

### BRIEF SUMMARY

[0008] The present disclosure provides an AAV-ITR based gene delivery system comprising (i) a linear double-stranded DNA (dsDNA) AAV-ITR vector comprising 5′ and 3′ AAV ITR flanking a polynucleotide sequence encoding a therapeutic polypeptide, a therapeutic polynucleotide, or a combination thereof, and, (ii) a mRNA Rep vector encoding a Rep protein. In some aspects, (i) is encapsulated in a first liposome or lipid nanoparticle (LNP) and (ii) encapsulated in a second liposome or LNP. In some aspects, the ITR comprises an ITR sequence selected from AAV1, AAV2, AAV3, AAV3B, AAV4, AAV5, AAV6, AAV7, AAV8, AAV9, AAV10, AAV11, AAV12, AAV13, it is an ortholog parvoviral ITR, it is a functional fragment of a parvoviral ITR, or it is a functional variant of a parvoviral ITR. In some aspects, the mRNA Rep vector comprises an mRNA encoding an AAV Rep protein. In some aspects, the AAV Rep protein comprises a Rep78 protein, a Rep68 protein, a variant thereof, or a functional fragment thereof. In some aspects, the AAV Rep78 protein is from AAV1, AAV2, AAV3, AAV3B, AAV4, AAV5, AAV6, AAV7, AAV8, AAV9, AAV10, AAV11, AAV12, or AAV13, it is a Rep78 variant, or it is a Rep78 functional fragment.

[0009] In some aspects, the AAV-ITR based gene delivery system of the present disclosure comprises an AAV-ITR vector having the topology of Schema I, shown below:

[ITRL]-[E]-[P]-[I]-[GOI]-[P(A) signal]-[ITRR]

wherein ITRL and ITRR are ITRs, and ITRR is the reverse complement if ITRL; E is an enhancer; P is a promoter; I is an intron; GOI is a polynucleotide sequence encoding a therapeutic polypeptide, a therapeutic polynucleotide, or a combination thereof; and, P(A) signal is a polyadenylation signal.

[0010] In some aspects, the AAV-ITR based gene delivery system of the present disclosure comprises a Rep vector having the topology of Schema II, shown below:

[P]-[5′ UTR]-[Rep78/68]-[3′ UTR]-[P(A) tail]

wherein P is a promoter; 5′ UTR is a 5′ untranslated region (UTR); 3′ UTR is a 3′ untranslated region; Rep78/68 is a polynucleotide sequence encoding a Rep78 or Rep68 protein; and, P(A) tail is a polyadenylation tail.

[0011] In some aspects, the polynucleotide sequence encodes an antibody, an enzyme, a receptor, an ion channel, a vaccine antigen, a chimeric antigen receptor (CAR), a hormone, a cytokine, a growth factor, or an apoptosis regulator. The liposome and/or LNP comprises (i) a cationic or ionizable lipid or lipidoid; (ii) a structural lipid; (iii) a helper lipid; (iv) a stabilizing lipid; or, (v) a combination thereof. In some aspects, the ionizable lipid or lipidoid is selected from the group consisting of cKK-E12, AIC-0315, SM-102, YK-009, DLin-MC3-DMA (MC3), DLin-KC2-DMA (KC2), A6, OF-02, A18-Iso5-2DC18, 98N12-5, 9A1p9, C12-200, 7C1, G0-C14, L319, 304O13, OF-Deg-Lin, 306-O12B, 306O110, FTT5, Lipid 10, and combinations thereof. In some aspects, the delivery system is targeted using at least one targeting molecule. In some aspects, the at least one targeting molecule is an antibody or a combination thereof. In some aspects, the antibody is an M-STAR antibody or a combination thereof.

[0012] The present disclosure also provides a method of replicating a polynucleotide encoding a therapeutic polypeptide, therapeutic polynucleotide or combination thereof in vivo in a patient in need of treatment for a disease or condition, comprising co-delivering the AAV-ITR based gene delivery system of the present disclosure to the patient to transiently express the Rep protein encoded by the Rep vector to replicate and amplify the polynucleotide encoding the therapeutic polypeptide, therapeutic polynucleotide or combination encoded by the AAV-ITR vector. Also provided is a method of delivering a therapeutic polypeptide, therapeutic polynucleotide or combination thereof in vivo to a patient in need of treatment for a disease or condition, comprising co-delivering the AAV-ITR based gene delivery system of the present disclosure to the patient, wherein the Rep protein encoded by the Rep vector is expressed transiently and replicates and amplifies the polynucleotide encoding the therapeutic polypeptide, therapeutic polynucleotide or combination encoded by the AAV-ITR vector, and wherein the expression of the therapeutic polypeptide, therapeutic polynucleotide or combination thereof treats the disease or condition in the patient.

[0013] The present disclosure also provides a therapeutic polypeptide, therapeutic polynucleotide or combination produced in vivo or ex vivo by co-delivering the AAV-ITR based gene delivery system of the present disclosure to a host cell, wherein the Rep protein encoded by the Rep vector is expressed transiently and replicates and amplifies the polynucleotide encoding the therapeutic polypeptide, therapeutic polynucleotide or combination encoded by the AAV-ITR vector, and wherein the cell expresses the therapeutic polypeptide, therapeutic polynucleotide or combination thereof. Also provided is a set of vectors comprising (i) a linear dsDNA AAV-ITR vector comprising 5′ and 3′ AAV ITR flanking a polynucleotide sequence encoding a therapeutic polypeptide, a therapeutic polynucleotide, or a combination thereof, and, (ii) a linear mRNA Rep vector encoding a Rep protein, wherein the vectors are co-encapsulated in a lipidic or polymeric delivery system, and wherein the lipidic or polymeric delivery system is targeted to a specific cell or tissue. Also provided is a host cell comprising (i) a linear dsDNA AAV-ITR vector comprising 5′ and 3′ AAV ITR flanking a polynucleotide sequence encoding a therapeutic polypeptide, a therapeutic polynucleotide, or a combination thereof; and, (ii) a linear mRNA Rep vector encoding a Rep protein. Also provided is a kit comprising (i) a linear dsDNA AAV-ITR vector comprising 5′ and 3′ AAV ITR flanking a polynucleotide sequence encoding a marker; and, (ii) a linear mRNA Rep vector encoding a Rep protein, and instructions to replace the marker with a polynucleotide encoding a therapeutic polypeptide, a therapeutic polynucleotide, or a combination thereof.

### BRIEF DESCRIPTION OF THE DRAWINGS/FIGURES

[0014] Some aspects of the invention are herein described, by way of example only, with reference to the accompanying drawings. With specific reference now to the drawings in detail, it is stressed that the particulars shown are by way of example and for purposes of illustrative discussion of aspects of the invention.

[0015] FIG. 1A shows a schematic of the replication of an AAV DNA.

[0016] FIG. 1B shows a Southern blot of replicated AAV-ITR DNA in the presence of different cellular replication proteins. Arrows indicate the proteins that are necessary for DNA replication (Pol d, RFC, PCNA, MCM complex, and Rep68/78).

[0017] FIG. 2A shows a schematic representation of a linear dsDNA AAV-ITR vector that comprises a polynucleotide encoding a gene of interest (GOI) and regulatory elements flanked by ITRs.

[0018] FIG. 2B shows a schematic representation of a mRNA Rep vector comprising a Rep78 mRNA encoding a Rep78 protein.

[0019] FIG. 3A depicts a schematic diagram indicating how the dsDNA of AAV-ITR vectors (AAV ITR-EGFP) are encapsulated in LIPOFECTAMINE™ 2000 liposomes and how the mRNA of Rep vectors (Rep78 vector) are encapsulated in LIPOFECTAMINE® MESSENGERMAX™ mRNA Transfection Reagent liposomes and mixed at different ratios of the two different vectors. The resulting liposomes encapsulating the AAV-ITR vector or Rep vector were transfected to C2C12 cells using the different ratios of AAV-ITR vector (AAV-GFP DNA) to Rep vector (Rep 78 RNA).

[0020] FIG. 3B depicts plots of the percentage of EGFP+ cells versus days post transfection for the various mixtures of AAV-ITR vector (AAV-EGFP DNA) to Rep vector (Rep 78 RNA). Data is presented as percentage of GFP+ cells (% GFP) over time and medium fluorescent intensity (MFI) over time, showing that ITR_EGFP dsDNA co-transfected with Rep78 mRNA results in sustained GFP protein expression in 3T3 embryonic fibroblast cells.

[0021] FIG. 4 shows the transient expression of Rep78 protein in C2C12 cells post co-transfection on the time points indicated (Day 3, Day 7).

[0022] FIG. 5 shows quantitative analysis of EGFP mRNA level and ITR-EGFP DNA level from C2C12 cells co-transfected with ITR-EGFP dsDNA and Rep78 mRNA measured at 1 week, 2 weeks, 3 weeks or 4 weeks after transfection. The level of EGFP RNA was measured using qPCR detecting EGFP mRNA.

[0023] FIG. 6 shows quantitative analysis of ITR-EGFP DNA level from C2C12 cells co-transfected with ITR-EGFP dsDNA and Rep78 mRNA. Genomic and Episomal DNA fractions were also quantitated using qPCR.

[0024] FIG. 7A shows the selection of clones for the analysis of ITR-EGFP DNA integration into host cell genome using whole genome sequencing.

[0025] FIG. 7B shows the percentage of EGFP located in the nucleus which is about 0.0 for each measurement.

[0026] FIG. 8A shows the experimental design of the in vivo expression experiment in mice. Luciferase expression was measured after preparation of liposomes made with in vivo-jetPEI® in vivo transfection reagent or in vivo-jetPEI® in vivo transfection reagent that contained an AAV-ITR vector (AAV ITR-Luc DNA) or a Rep78 vector (Rep78 mRNA), respectively. The liposomes were formulated in each case using an N/P ratio of 8.

[0027] FIG. 8B shows the relative Luciferase expression following administration of only the IG. 8B shows the luciferase expression in mice receiving AAV-ITR vector (AAV ITR-Luc DNA), or AAV-ITR vector (AAV ITR-Luc DNA) plus Rep78 vector (Rep78 mRNA).

[0028] FIG. 9 shows the exemplary structure of an AVV-ITR vector (A) comprising a polynucleotide encoding a CAR as payload. Diagrams (B) and (C) show the architectures of two CAR-encoding polynucleotides that can be integrated in the AAV-ITR vector (A). Diagram (B) corresponds to the architecture of a construct encoding a bispecific CAR with a CD19 and CD18 antigen binding moiety in MSTAR format, and with a CD8-derived spacer and transmembrane domain. A specific CAR construct with this architecture is set forth in SEQ ID NO: 18. Diagram (C) corresponds to the architecture of a construct encoding a bispecific CAR with a CD19 and CD18 antigen binding moiety in MSTAR format, and with a CD8-derived spacer and transmembrane domain. A specific CAR construct with this architecture is set forth in SEQ ID NO: 19.

[0029] FIG. 10 is a schematic representation of lipid delivery systems that can be used to encapsulate the AAV-ITR vector and/or Rep vector of the delivery systems of the present disclosure. For example the AAV-ITR vector and/or Rep vector can be independently or simultaneously delivered using liposomes (e.g., multilamellar vesicles, large unilamellare vesicles, or small unilamellar vesicles), lipid nanoparticles, or combinations thereof. The liposomes and/or lipid nanoparticles can be, e.g., untargeted, targeted, or stealth.

[0030] FIG. 11A shows the sequences and structures of the 3′ ITRs from AAV1, AAV2, AAV3, AAV4, AAV6 and AAV7. Bold letters denote non-conserved nucleotides between the ITR sequences.

[0031] FIG. 11B shows a consensus AAV 3′ ITR sequence. IUPAC nomenclature is used to designate variable nucleotides: Y is C or T; R is A or G; S is G or C; W is A or T; K is G or T; M is A or C; B is G or T or C; V is G or C or A; and N is any nucleotide. In some aspects, the invention disclosed herein can the practiced using ITRs comprising a consensus sequence that comprises one of more universal bases.

[0032] FIG. 12 shows a detailed secondary structure diagram of the AAV2 3′ ITR. The AAV2 3′ ITR serves as origin of replication and is composed of two arm palindromes (B-B′ and C-C′) embedded in a larger stem palindrome (A-A′). The ITR can acquire two configurations (flip and flop). The flip (depicted) and flop configurations have the B-B′ and the C-C′ palindrome closest to the 3′ end, respectively. The D sequence is present only once at each end of the genome thus remaining single-stranded. The boxed motif corresponds to the Rep-binding element (RBE) where the AAV Rep78 and Rep68 proteins bind. The RBE consists of a tetranucleotide repeat with the consensus sequence 5′-GNGC-3′. The ATP-dependent DNA helicase activities of Rep78 and Rep68 remodel the A-A′ region generating a stem-loop that locates at the summit of the terminal resolution site (trs) in a single-stranded form. In this configuration, the strand- and site-specific endonuclease catalytic domain of Rep78 and Rep68 introduces a nick at the trs. The shaded nucleotides at the apex of the T-shaped structure correspond to an additional RBE (RBE′) that stabilizes the association between the two largest Rep proteins and the ITR.

### DETAILED DESCRIPTION

[0033] The present invention provides an improved AAV-ITR based gene delivery system that delivers nucleic acids coding for therapeutic agents (e.g., therapeutic polypeptides, therapeutic polynucleotides, or combinations thereof) to a host or host cell in need of treatment with high efficiency and sustained gene expression. In some aspects, the AAV-ITR based gene delivery system of the present disclosure comprises a combination of a double stranded AAV-ITR vector comprising a polynucleotide encoding a therapeutic agent, and a Rep vector comprising an mRNA encoding a Rep protein (e.g., Rep 68 or Rep 78).

[0034] Linear dsDNA vectors containing ITRs from AAV or other parvovirus flanking a transcription unit (cassette) containing at least one polynucleotide encoding a GOI have been developed (AAV-ITR vectors). Advantageously, the amplification of a dsDNA AAV-ITR vector comprising a polynucleotide encoding a GOI in the presence of transiently expressed a Rep78 or a Rep68 protein encoded by a second linear vector (Rep vector) results in persistent gene expression through episomal. The AAV-ITR based gene delivery system of the present disclosure is optionally capsid free. As used herein, the term “capsid free” refers to AAV-ITR based gene delivery system that is not encapsulated in a native parvoviral capsid. In some aspects, an AAV-ITR based gene delivery system can be encapsulated in a virus-like particle, a chimeric capsid comprising one or more parvoviral capsid component or fragment thereof, or lipid-based structure (e.g., liposome or lipid nanoparticle) comprising one or more parvoviral capsid component or fragment thereof,

[0035] Such a combination of ITR vector with the expression of Rep68/78 results in amplification of ITR vector and enhanced episomal maintenance of the vector in the cells, which provides the base for sustained transgene expression.

[0036] The AAV-ITR vector and Rep vectors of the present disclosure can be encapsulated in lipidic delivery systems such as liposomes or LNP, or in polymeric delivery systems. Alternatively, the vectors can be transfected into host cells using other transfection methods and compositions known in the art, for example, electroporation, lipofection or any non-viral gene transfer method.

[0037] In some aspects, the lipidic delivery system used to encapsulate the AAV-ITR vector is a liposome or LNP optimized for dsDNA delivery. In some aspects, the lipidic delivery system used to encapsulate the Rep vector is a liposome or LNP optimized for mRNA delivery.

[0038] The present disclosure also provides methods of enhanced transfection, methods of treatment, vectors, cells, and kits comprising the AAV ITR-base vector for gene delivery system of the present disclosure. LNPs, lipids and other LNP and delivery system components, payloads (e.g., CAR), targeting moieties (e.g., antibodies), etc. disclosed in PCT application PCT/US2024/053954 and U.S. application Ser. No. 18/933,688, can be used in combination with the disclosures of the present application the practice the inventions disclosed herein without undue experimentation. For example, any one the ionizable cationic lipids disclosed herein can be replaced with one of the ionizable cationic lipids disclosed in PCT application PCT/US2024/053954 and U.S. application Ser. No. 18/933,688. Likewise, any of the payloads disclosed herein can be replaced with any of the payload disclosed in PCT application PCT/US2024/053954 and U.S. application Ser. No. 18/933,688; any of the MSTAR constructs disclosed herein can be replaced with any of the MSTAR constructs disclosed in the PCT application PCT/US2024/053954 and U.S. application Ser. No. 18/933,688. The PCT application PCT/US2024/053954 and U.S. application Ser. No. 18/933,688 are incorporated herein in their entireties.

[0039] The present disclosure also provides methods of gene delivery to any cell type where expression of gene of interest can provide therapeutic benefit to certain diseases. Various terms relating to aspects of disclosure are used throughout the specification and claims. Such terms are to be given their ordinary meaning in the art, unless otherwise indicated. Other specifically defined terms are to be construed in a manner consistent with the definitions provided herein.

### Definitions

[0040] In order that the present description can be more readily understood, certain terms are first defined. Additional definitions are set forth throughout the detailed description. It is to be noted that the term “a” or “an” entity refers to one or more of that entity; for example, “a nucleotide sequence,” is understood to represent one or more nucleotide sequences. As such, the terms “a” (or “an”), “one or more,” and “at least one” can be used interchangeably herein. Furthermore, “and/or” where used herein is to be taken as specific disclosure of each of the two specified features or components with or without the other. Thus, the term “and/or” as used in a phrase such as “A and/or B” herein is intended to include “A and B,” “A or B,” “A” (alone), and “B” (alone). Likewise, the term “and/or” as used in a phrase such as “A, B, and/or C” is intended to encompass each of the following aspects: A, B, and C; A, B, or C; A or C; A or B; B or C; A and C; A and B; B and C; A (alone); B (alone); and C (alone). It is understood that wherever aspects are described herein with the language “comprising,” otherwise analogous aspects described in terms of “consisting of” and/or “consisting essentially of” are also provided.

[0041] Unless defined otherwise, all technical and scientific terms used herein have the same meaning as commonly understood by one of ordinary skill in the art to which this disclosure is related. For example, the Concise Dictionary of Biomedicine and Molecular Biology, Juo, Pei-Show, 2nd ed., 2002, CRC Press; The Dictionary of Cell and Molecular Biology, 5th ed., 2013, Academic Press; and the Oxford Dictionary of Biochemistry and Molecular Biology, 2006, Oxford University Press, provide one of skill with a general dictionary of many of the terms used in this disclosure.

[0042] Units, prefixes, and symbols are denoted in their Système International de Unites (SI) accepted form. Numeric ranges are inclusive of the numbers defining the range. Unless otherwise indicated, nucleotide sequences are written left to right in 5′ to 3′ orientation. Amino acid sequences are written left to right in amino to carboxy orientation. Sequences identified by SEQ ID NO are included in the ST.26 sequence listing according to the requirements of the standard, which requires uracils (u) to the replaced by thymines (t) in RNA sequences. It is to be understood that in some cases mixed sequences such as RNAi compounds can comprise both RNA and DNA nucleotides in the same molecule. Mixed type molecules are identified by an * following the SEQ ID NO. A person of ordinary skill in the art can determine whether a ‘t’ corresponds to a ‘t’ or an ‘u’ in the actual drug based and whether a nucleotide is RNA or DNA based on additional information provided in the specification, e.g., the INN (International Nonproprietary Name) of the compound.

[0043] The headings provided herein are not limitations of the various aspects of the disclosure, which can be had by reference to the specification as a whole. Accordingly, the terms defined immediately below are more fully defined by reference to the specification in its entirety.

[0044] The term “about” is used herein to mean approximately, roughly, around, or in the regions of. When the term “about” is used in conjunction with a numerical range, it modifies that range by extending the boundaries above and below the numerical values set forth. In general, the term “about” can modify a numerical value above and below the stated value by a variance of, e.g., 15 percent, up or down (higher or lower). Thus, in some aspects, about is interchangeable with ±15%. When particular values or compositions are provided in the application and claims, unless otherwise stated, the meaning of “about” should be assumed to be within an acceptable error range for that particular value or composition.

[0045] As described herein, any numerical range, concentration range, percentage range, ratio range or integer range is to be understood to include the value of any integer within the recited range and, when appropriate, fractions thereof (such as one-tenth and one-hundredth of an integer), unless otherwise indicated.

[0046] As used herein, the term “antigen binding polypeptide” refers to a polypeptide having the ability to specifically bind to one or more substances that induce an immune response (i.e., one or more antigens or epitopes).

[0047] As used herein, the term “antigen binding polypeptide complex” refers to a group of two, three, four, or more associated polypeptides, wherein at least one polypeptide has the ability to specifically bind to one or more antigens. An antigen binding polypeptide complex, includes, but is not limited to, an antibody or antigen binding fragment thereof.

[0048] The term “antibody” includes, without limitation, a glycoprotein immunoglobulin which binds specifically to an antigen and comprises at least two heavy (H) chains and two light (L) chains interconnected by disulfide bonds. Each H chain comprises a heavy chain variable region (abbreviated herein as VH) and a heavy chain constant region. The heavy chain constant region comprises three constant domains, CH1, CH2 and CH3. Each light chain comprises a light chain variable region (abbreviated herein as VL) and a light chain constant region. The light chain constant region comprises one constant domain, CL. The VH and VL regions can be further subdivided into regions of hypervariability, termed complementarity determining regions (CDRs), interspersed with regions that are more conserved, termed framework regions (FR). Each VH and VL comprises three CDRs and four FRs, arranged from amino-terminus to carboxy-terminus in the following order: FR1, CDR1, FR2, CDR2, FR3, CDR3, FR4. The variable regions of the heavy and light chains contain a binding domain that interacts with an antigen. The constant regions of the antibodies can mediate the binding of the immunoglobulin to host tissues or factors, including various cells of the immune system (e.g., effector cells) and the first component (C1q) of the classical complement system. A heavy chain can have the C-terminal lysine or not. Unless specified otherwise herein, the amino acids in the variable regions are numbered using the Kabat numbering system and those in the constant regions are numbered using the EU system.

[0049] The term “monoclonal antibody,” as used herein, refers to an antibody that is produced by a single clone of B-cells and binds to the same epitope. In contrast, the term “polyclonal antibody” refers to a population of antibodies that are produced by different B-cells and bind to different epitopes of the same antigen. The term “antibody” includes, by way of example, monoclonal and polyclonal antibodies; chimeric and humanized antibodies; human or non-human antibodies; wholly synthetic antibodies; and single chain antibodies. A non-human antibody can be humanized by recombinant methods to reduce its immunogenicity in man.

[0050] The antibody can be an antibody that has been altered (e.g., by mutation, deletion, substitution, conjugation to a non-antibody moiety). For example, an antibody can include one or more variant amino acids (compared to a naturally occurring antibody) which change a property (e.g., a functional property) of the antibody. For example, several such alterations are known in the art which affect, e.g., half-life, effector function, and/or immune responses to the antibody in a patient. The term antibody also includes artificial polypeptide constructs which comprise at least one antibody-derived antigen-binding site.

[0051] An “antigen binding fragment” of an antibody refers to one or more fragments or portions of an antibody that retain the ability to bind specifically to the antigen bound by the whole antibody. It has been shown that the antigen binding function of an antibody can be performed by fragments or portions of a full-length antibody. An antigen-binding fragment can contain the antigenic determining regions of an intact antibody (e.g., the CDRs). Examples of antigen binding fragments of antibodies include, but are not limited to, Fab, Fab′, F(ab′)2, and Fv fragments, linear antibodies, and single chain antibodies. An antigen-binding fragment of an antibody can be derived from any animal species, such as rodents (e.g., mouse, rat, or hamster) and humans or can be artificially produced.

[0052] Furthermore, although the two domains of the Fv fragment, VL and VH, are coded for by separate genes, they can be joined, using recombinant methods, by a synthetic linker that enables them to be made as a single protein chain in which the VL and VH regions pair to form monovalent molecules (known as single chain Fv (scFv); see, e.g., Bird et al. (1988) Science 242:423-426; and Huston et al. (1988) Proc. Natl. Acad. Sci. USA 85:5879-5883). Such single chain antibodies are also intended to be encompassed within the term “antigen-binding fragment” of an antibody.

[0053] Antigen binding fragments are obtained using conventional techniques known to those with skill in the art, and the fragments screened for utility in the same manner as are intact antibodies. Antigen binding fragments can be produced by recombinant DNA techniques, or by enzymatic or chemical cleavage of intact immunoglobulins.

[0054] As used herein, the term “variable region” typically refers to a portion of an antibody, generally, a portion of a light or heavy chain, typically about the amino-terminal 110 to 120 amino acids, or 110 to 125 amino acids in the mature heavy chain and about 90 to 115 amino acids in the mature light chain, which differ extensively in sequence among antibodies and are used in the binding and specificity of a particular antibody for its particular antigen.

[0055] The terms “complementarity determining region” or “CDR”, as used herein, refer to each of the regions of an antibody variable domain which are hypervariable in sequence and/or form structurally defined loops (hypervariable loops) and/or contain the antigen-contacting residues. Antibodies can comprise six CDRs, e.g., three in the VH and three in the VL.

[0056] The terms “VL”, “VL region,” and “VL domain” are used herein interchangeably to refer to the light chain variable region of an antigen binding polypeptide, antigen binding polypeptide complex, antibody or antigen binding fragment thereof. In some aspects, a VL region is referred to herein as VL1 to denote a first light chain variable region, VL2 to denote a second light chain variable region, VL3 to denote a third light chain variable region, and VL4 to denote a fourth light chain variable region. An enumerated VL region (e.g., VL1) can have the same or different antigen binding properties and/or the same or different sequence as another enumerated VL region (e.g., VL2).

[0057] The terms “VH”, “VH region,” and “VH domain” are used herein interchangeably to refer to the heavy chain variable region of an antigen binding polypeptide, antigen binding polypeptide complex, antibody or antigen binding fragment thereof. In some aspects, a VH region is referred to herein as VH1 to denote a first heavy chain variable region, VH2 to denote a second heavy chain variable region, VH3 to denote a third heavy chain variable region, and VH4 to denote a fourth heavy chain variable region. An enumerated VH region (e.g., VH1) can have the same or different antigen binding properties and/or the same or different sequence as another enumerated VH region (e.g., VH2).

[0058] As used herein, “Kabat numbering” and like terms are recognized in the art and refer to a system of numbering amino acid residues in the heavy and light chain variable regions of an antibody or antigen binding fragment thereof. In some aspects, CDRs can be determined according to the Kabat numbering system (see, e.g., Kabat E A & Wu T T (1971) Ann NY Acad Sci 190: 382-391 and Kabat E A et al., (1991) Sequences of Proteins of Immunological Interest, Fifth Edition, U.S. Department of Health and Human Services, NIH Publication No. 91-3242). Using the Kabat numbering system, CDRs within an antibody heavy chain molecule are typically present at amino acid positions 31 to 35, which optionally can include one or two additional amino acids, following 35 (referred to in the Kabat numbering scheme as 35A and 35B) (CDR1), amino acid positions 50 to 65 (CDR2), and amino acid positions 95 to 102 (CDR3). Using the Kabat numbering system, CDRs within an antibody light chain molecule are typically present at amino acid positions 24 to 34 (CDR1), amino acid positions 50 to 56 (CDR2), and amino acid positions 89 to 97 (CDR3).

[0059] As used herein, the terms “constant region” or “constant domain” are used interchangeably to refer to a portion of an antigen binding polypeptide, antigen binding polypeptide complex, antibody or antigen binding fragment thereof, e.g., a carboxyl terminal portion of a light and/or heavy chain which is not directly involved in binding of an antibody to antigen but which can exhibit various effector functions, such as interaction with the Fc region. The constant region generally has a more conserved amino acid sequence relative to a variable region. In some aspects, an antigen binding polypeptide, antigen binding polypeptide complex, antibody or antigen binding fragment thereof comprises a constant region or portion thereof that is sufficient for antibody-dependent cell-mediated cytotoxicity (ADCC), antibody-dependent cellular phagocytosis (ADCP), and complement-dependent cytotoxicity (CDC). A constant region includes, but is not limited to, a light chain constant region (CL) or heavy chain constant region (CH1, CH2, CH3).

[0060] As used herein, the terms “fragment crystallizable region,” “Fc region,” or “Fc domain” are used interchangeably herein to refer to the tail region of an antibody that interacts with cell surface receptors called Fc receptors and some proteins of the complement system. Fc regions typically comprise CH2 and CH3 regions, and, optionally, an immunoglobulin hinge.

[0061] As used herein, the terms “immunoglobulin hinge,” “hinge,” “hinge domain” or “hinge region” are used interchangeably to refer to a stretch of heavy chains between the Fab and Fc portions of an antigen binding polypeptide, antigen binding polypeptide complex, antibody or antigen binding fragment thereof. A hinge provides structure, position and flexibility, which assist with normal functioning of antibodies (e.g., for crosslinking two antigens or binding two antigenic determinants on the same antigen molecule). An immunoglobulin hinge is divided into upper, middle and lower hinge regions that can be separated based on structural and/or genetic components. An immunoglobulin hinge of the invention can contain one, two or all three of these regions. Structurally, the upper hinge region stretches from the C terminal end of CH1 to the first hinge disulfide bond. The middle hinge region stretches from the first cysteine to the last cysteine in the hinge. The lower hinge region extends from the last cysteine to the glycine of CH2. The cysteines present in the hinge form interchain disulfide bonds that link the immunoglobulin monomers.

[0062] As used herein, the term “Fab” refers to a region of an antibody that binds to an antigen. It is typically composed of one constant and one variable domain of each of the heavy and the light chain.

[0063] As used herein, the term “heavy chain” refers to a portion of an antigen binding polypeptide, antigen binding polypeptide complex, antibody or antigen binding fragment thereof typically composed of a heavy chain variable region (VH), a heavy chain constant region 1 (CH1), a heavy chain constant region 2 (CH2), and a heavy chain constant region 3 (CH3). A typical antibody is composed of two heavy chains and two light chains. When used in reference to an antibody, a heavy chain can refer to any distinct type, e.g., alpha (a), delta (6), epsilon (F), gamma (γ), and mu (p), based on the amino acid sequence of the constant region, which gives rise to IgA, IgD, IgE, IgG, and IgM classes of antibodies, respectively, including subclasses of IgG, e.g., IgG1, IgG2, IgG3, and IgG4. Heavy chain amino acid sequences are known in the art. In some aspects, the heavy chain is a human heavy chain.

[0064] As used herein, the term “light chain” refers to a portion of an antigen binding polypeptide, antigen binding polypeptide complex, antibody or antigen binding fragment thereof typically composed of a light chain variable region (VL) and a light chain constant region (CL). A typical antibody is composed of two light chains and two heavy chains. When used in reference to an antibody, a light chain can refer to any distinct type, e.g., kappa (κ) or lambda (λ), based on the amino acid sequence of the constant region. Light chain amino acid sequences are known in the art. In some aspects, the light chain is a human light chain.

[0065] The term “chimeric” antibody or antigen-binding fragment thereof refers to an antibody or antigen binding fragments thereof wherein the amino acid sequence is derived from two or more species. Typically, the variable region of both light and heavy chains corresponds to the variable region of antibodies or antigen binding fragments thereof derived from one species of mammals (e.g., mouse, rat, rabbit, etc.) with the desired specificity, affinity and capability, while the constant regions are homologous to the sequences in antibodies or antigen binding fragments thereof derived from another (usually human) to avoid eliciting an immune response in that species.

[0066] The term “humanized” antibody or antigen binding fragment thereof refers to forms of non-human (e.g., murine) antibodies or antigen binding fragments that are specific immunoglobulin chains, chimeric immunoglobulins, or fragments thereof that contain minimal non-human (e.g., murine) sequences. Typically, humanized antibodies or antigen binding fragments thereof are human immunoglobulins in which residues from a complementary determining region (CDR) are replaced by residues from a CDR of a non-human species (e.g., mouse, rat, rabbit, hamster) that have the desired specificity, affinity, and capability (Jones et al., Nature 321:522-525 (1986); Riechmann et al., Nature 332:323-327 (1988); Verhoeyen et al., Science 239:1534-1536 (1988)). In some aspects, the Fv framework region (FR) residues of a human immunoglobulin are replaced with the corresponding residues in an antibody or fragment from a non-human species that has the desired specificity, affinity, and capability. The humanized antibody or antigen binding fragment thereof can be further modified by the substitution of additional residues either in the Fv framework region and/or within the replaced non-human residues to refine and optimize antibody or antigen-binding fragment thereof specificity, affinity, and/or capability. In general, a humanized antibody or antigen binding fragment thereof will comprise substantially all of at least one, and typically two or three, variable domains containing all or substantially all of the CDR regions that correspond to the non-human immunoglobulin whereas all or substantially all of the FR regions are those of a human immunoglobulin consensus sequence. A humanized antibody or antigen binding fragment thereof can also comprise at least a portion of a constant region, typically that of a human immunoglobulin. Examples of methods used to generate humanized antibodies are known and described, for example, in U.S. Pat. No. 5,225,539; Roguska et al., Proc. Natl. Acad. Sci., USA, 91(3):969-973 (1994), and Roguska et al., Protein Eng. 9(10):895-904 (1996).

[0067] The term “human” antibody or antigen-binding fragment thereof, as used herein, means an antibody or antigen-binding fragment thereof having an amino acid sequence derived from a human immunoglobulin gene locus, where such antibody or antigen-binding fragment is made using recombinant techniques known in the art. This definition of a human antibody or antigen-binding fragment thereof includes intact or full-length antibodies and fragments thereof.

[0068] A polypeptide, polypeptide complex, antibody, antigen binding fragment thereof, polynucleotide, vector or host cell which is “isolated” is a polypeptide, polypeptide complex, antibody, antigen binding fragment thereof, polynucleotide, vector or host cell which is in a form not found in nature. Isolated polypeptides, polypeptide complexes, antibodies, antigen binding fragments thereof, polynucleotides, vectors or host cells include those which have been purified to a degree that they are no longer in a form in which they are found in nature. In some aspects, a polypeptide, polypeptide complex, antibody, antigen-binding fragment thereof, polynucleotide, vector or host cell which is isolated is substantially pure. As used herein, “substantially pure” refers to material which is at least 50% pure (i.e., free from contaminants), at least 90% pure, at least 95% pure, at least 98% pure, or at least 99% pure.

[0069] The terms “polypeptide,” “peptide,” and “protein” are used interchangeably herein to refer to polymers of amino acids of any length. The polymer can be linear or branched, it can comprise modified amino acids, and it can be interrupted by non-amino acids. The terms also encompass an amino acid polymer that has been modified naturally or by intervention; for example, disulfide bond formation, glycosylation, lipidation, acetylation, phosphorylation, or any other manipulation or modification, such as conjugation with a labeling component. Also included within the definition are, for example, polypeptides containing one or more analogs of an amino acid (including, for example, unnatural amino acids, etc.), as well as other modifications known in the art. It is understood that, because the polypeptides of this invention are based upon antibodies, in some aspects, the polypeptides can occur as single chains or associated chains.

[0070] As used herein, the term “identity” refers to the overall monomer conservation between polymeric molecules, e.g., between polypeptide molecules or polynucleotide molecules (e.g. DNA molecules and/or RNA molecules). The term “identical” without any additional qualifiers, e.g., protein A is identical to protein B, implies the sequences are 100% identical (100% sequence identity). Describing two sequences as, e.g., “70% identical,” is equivalent to describing them as having, e.g., 70% sequence identity.”

[0071] Calculation of the percent identity of two polypeptide sequences, for example, can be performed by aligning the two sequences for optimal comparison purposes (e.g., gaps can be introduced in one or both of a first and a second polypeptide sequences for optimal alignment and non-identical sequences can be disregarded for comparison purposes). In certain aspects, the length of a sequence aligned for comparison purposes is at least about 30%, at least about 40%, at least about 50%, at least about 60%, at least about 70%, at least about 80%, at least about 90%, at least about 95%, or about 100% of the length of the reference sequence. The amino acids at corresponding amino acid positions are then compared.

[0072] When a position in the first sequence is occupied by the same amino acid as the corresponding position in the second sequence, then the molecules are identical at that position. The percent identity between the two sequences is a function of the number of identical positions shared by the sequences, taking into account the number of gaps, and the length of each gap, which needs to be introduced for optimal alignment of the two sequences. The comparison of sequences and determination of percent identity between two sequences can be accomplished using a mathematical algorithm.

[0073] Suitable software programs are available from various sources, and for alignment of both protein and nucleotide sequences. One suitable program to determine percent sequence identity is bl2seq, part of the BLAST suite of program available from the U.S. government's National Center for Biotechnology Information BLAST web site (blast.ncbi.nlm.nih.gov). Bl2seq performs a comparison between two sequences using either the BLASTN or BLASTP algorithm. BLASTN is used to compare nucleic acid sequences, while BLASTP is used to compare amino acid sequences. Other suitable programs are, e.g., Needle, Stretcher, Water, or Matcher, part of the EMBOSS suite of bioinformatics programs and also available from the European Bioinformatics Institute (EBI) at www.ebi.ac.uk/Tools/psa.

[0074] Sequence alignments can be conducted using methods known in the art such as MAFFT, Clustal (ClustalW, Clustal X or Clustal Omega), MUSCLE, etc.

[0075] Different regions within a single polynucleotide or polypeptide target sequence that aligns with a polynucleotide or polypeptide reference sequence can each have their own percent sequence identity. It is noted that the percent sequence identity value is rounded to the nearest tenth. For example, 80.11, 80.12, 80.13, and 80.14 are rounded down to 80.1, while 80.15, 80.16, 80.17, 80.18, and 80.19 are rounded up to 80.2. It also is noted that the length value will always be an integer.

[0076] In certain aspects, the percentage identity (% ID) or of a first amino acid sequence (or nucleic acid sequence) to a second amino acid sequence (or nucleic acid sequence) is calculated as % ID=100×(Y/Z), where Y is the number of amino acid residues (or nucleobases) scored as identical matches in the alignment of the first and second sequences (as aligned by visual inspection or a particular sequence alignment program) and Z is the total number of residues in the second sequence. If the length of a first sequence is longer than the second sequence, the percent identity of the first sequence to the second sequence will be higher than the percent identity of the second sequence to the first sequence.

[0077] One skilled in the art will appreciate that the generation of a sequence alignment for the calculation of a percent sequence identity is not limited to binary sequence-sequence comparisons exclusively driven by primary sequence data. It will also be appreciated that sequence alignments can be generated by integrating sequence data with data from heterogeneous sources such as structural data (e.g., crystallographic protein structures), functional data (e.g., location of mutations), or phylogenetic data. A suitable program that integrates heterogeneous data to generate a multiple sequence alignment is T-Coffee, available at www.tcoffee.org, and alternatively available, e.g., from the EBI. It will also be appreciated that the final alignment used to calculate percent sequence identity can be curated either automatically or manually.

[0078] The term “polynucleotide” as used herein refers to polymers of nucleotides of any length, including ribonucleotides, deoxyribonucleotides, analogs thereof, or mixtures thereof. This term refers to the primary structure of the molecule. Thus, the term includes triple-, double- and single-stranded deoxyribonucleic acid (“DNA”), as well as triple-, double- and single-stranded ribonucleic acid (“RNA”). It also includes modified, for example by alkylation, and/or by capping, and unmodified forms of the polynucleotide. More particularly, the term “polynucleotide” includes polydeoxyribonucleotides (containing 2-deoxy-D-ribose), polyribonucleotides (containing D-ribose), including tRNA, rRNA, hRNA, siRNA and mRNA, whether spliced or unspliced, any other type of polynucleotide which is an N- or C-glycoside of a purine or pyrimidine base, and other polymers containing normucleotidic backbones, for example, polyamide (e.g., peptide nucleic acids “PNAs”) and polymorpholino polymers, and other synthetic sequence-specific nucleic acid polymers providing that the polymers contain nucleobases in a configuration which allows for base pairing and base stacking, such as is found in DNA and RNA. In some aspects of the present disclosure, the biologically active molecule attached to the EV, e.g., exosome, via a maleimide moiety is a polynucleotide, e.g., an antisense oligonucleotide. In particular aspects, the polynucleotide comprises an mRNA. In other aspect, the mRNA is a synthetic mRNA. In some aspects, the synthetic mRNA comprises at least one unnatural nucleobase. In some aspects, all nucleobases of a certain class have been replaced with unnatural nucleobases (e.g., all uridines in a polynucleotide disclosed herein can be replaced with an unnatural nucleobase, e.g., 5-methoxyuridine). In some aspects of the present disclosure, the biologically active molecule is a polynucleotide. In some aspects, a polynucleotide disclosed herein can be modified to introduce a thiol group that can be used to react with a maleimide moiety. In some aspects, a polynucleotide disclosed herein can be modified to introduce a maleimide moiety group that can be used to react with a thiol group.

[0079] The terms “polypeptide,” “peptide,” and “protein” are used interchangeably herein to refer to polymers of amino acids of any length. The polymer can comprise modified amino acids. The terms also encompass an amino acid polymer that has been modified naturally or by intervention; e.g., disulfide bond formation, glycosylation, lipidation, acetylation, phosphorylation, or any other manipulation or modification, such as conjugation with a labeling component. Also included within the definition are, for example, polypeptides containing one or more analogs of an amino acid (including, for example, unnatural amino acids such as homocysteine, ornithine, p-acetylphenylalanine, D-amino acids, and creatine), as well as other modifications known in the art. In some aspects of the present disclosure, the biologically active molecule attached to the EV, e.g., exosome, via a maleimide moiety is a polypeptide, e.g., an antibody or a derivative thereof such as an ADC, a PROTAC, a toxin, a fusion protein, or an enzyme.

[0080] The term “polypeptide,” as used herein, refers to proteins, polypeptides, and peptides of any size, structure, or function. Polypeptides include gene products, naturally occurring polypeptides, synthetic polypeptides, homologs, orthologs, paralogs, fragments and other equivalents, variants, and analogs of the foregoing. A polypeptide can be a single polypeptide or can be a multi-molecular complex such as a dimer, trimer or tetramer. They can also comprise single chain or multichain polypeptides. Most commonly disulfide linkages are found in multichain polypeptides. The term polypeptide can also apply to amino acid polymers in which one or more amino acid residues are an artificial chemical analogue of a corresponding naturally occurring amino acid. In some aspects, a “peptide” can be less than or equal to 50 amino acids long, e.g., about 5, 10, 15, 20, 25, 30, 35, 40, 45, or 50 amino acids long.

[0081] In some aspects, a polypeptide disclosed herein can be modified to introduce a thiol group that can be used to react with a maleimide moiety. In some aspects, a polypeptide disclosed herein can be modified to introduce a maleimide moiety that can be used to react with a thiol group.

[0082] As used herein, the term “nanoparticle” refers to particles having a particle size on the nanometer scale, less than 1 micrometer. For example, the nanoparticle can have a particle size up to about 50 nm. In another example, the nanoparticle can have a particle size up to about 10 nm. In another example, the nanoparticle can have a particle size up to about 6 nm. As used herein, “nanoparticle” refers to a number of nanoparticles, including, but not limited to, nanoclusters, nanovesicles, micelles, lamaellae shaped particles, polymersomes, dendrimers, and other nano-size particles of various other small fabrications that are known to those in the art. The shapes and compositions of nanoparticles can be guided during condensation of atoms by selectively favoring growth of particular crystal facets to produce spheres, rods, wires, discs, cages, core-shell structures and many other shapes. The definitions and understandings of the entities falling within the scope of nanocapsule are known to those of skill in the art, and such definitions are incorporated herein by reference and for the purposes of understanding the general nature of the subject matter of the present application.

[0083] As used herein, the term “Chimeric Antigen Receptor” or alternatively a “CAR” refers to a recombinant polypeptide construct comprising at least an extracellular antigen binding domain, a transmembrane domain, and a cytoplasmic signaling domain comprising a functional signaling domain derived from a stimulatory molecule as defined below. In one aspect, the stimulatory molecule is the zeta chain associated with the T cell receptor complex. In one aspect, the cytoplasmic signaling domain further comprises one or more functional signaling domains derived from at least one costimulatory molecule as defined below. In one aspect, the costimulatory molecule is chosen from 4 1BB (i.e., CD137), CD3, and/or CD28. In one aspect, the CAR comprises a chimeric fusion protein comprising an extracellular antigen recognition domain, a transmembrane domain, and an intracellular signaling domain comprising a functional signaling domain derived from a stimulatory molecule. In one aspect, the CAR comprises a chimeric fusion protein comprising an extracellular antigen recognition domain, a transmembrane domain and an intracellular signaling domain comprising a functional signaling domain derived from a co-stimulatory molecule and a functional signaling domain derived from a stimulatory molecule. In one aspect, the CAR comprises a chimeric fusion protein comprising an extracellular antigen recognition domain, a transmembrane domain and an intracellular signaling domain comprising two functional signaling domains derived from one or more co-stimulatory molecule(s) and a functional signaling domain derived from a stimulatory molecule. In one aspect, the CAR comprises a chimeric fusion protein comprising an extracellular antigen recognition domain, a transmembrane domain and an intracellular signaling domain comprising at least two functional signaling domains derived from one or more co-stimulatory molecule(s) and a functional signaling domain derived from a stimulatory molecule. In one aspect the CAR comprises an optional leader sequence at the amino-terminus (N-ter) of the CAR fusion protein. In one aspect, the CAR further comprises a leader sequence at the N-terminus of the extracellular antigen recognition domain, wherein the leader sequence is optionally cleaved from the scFv domain during cellular processing and localization of the CAR to the cellular membrane.

[0084] The portion of the CAR composition comprising an antibody or antibody fragment thereof can exist in a variety of forms where the antigen binding domain is expressed as part of a contiguous polypeptide chain including, for example, a single domain antibody fragment (sdAb), a single chain antibody (scFv) and a humanized antibody. In one aspect, the antigen-binding domain of a CAR composition of the invention comprises an antibody fragment. In one embodiment, the CAR comprises an antibody fragment that comprises a scFv.

[0085] As used herein, the term “MSTAR” refers to an antibody format disclosed in U.S. Appl. Publ. Nos. US20230227553A1, US20230235092A1, US20230203199A1, and PCT Publ. Nos. WO2023056312, WO2023056313, WO2023056314, which are herein incorporated by reference in their entireties. In some aspects, the AAV-ITR based gene delivery system of the present disclosure can be targeted to a specific cell or tissue using, e.g., a monospecific, bispecific or trispecific MSTAR antibody. In some aspects, the AAV-ITR based gene delivery system of the present disclosure comprises an AAV-ITR vector wherein the polynucleotide encoding a therapeutic polypeptide, therapeutic polynucleotide, or combination thereof comprising ORFs encoding a MSTAR antibody. In some aspects, the polynucleotide encoding the MSTAR antibody is biscistronic. In some aspects, the polynucleotide comprises multiples cistrons, wherein each cistron encodes a polypeptide chain of an MSTAR antibody.

[0086] A “vector” is a composition of matter which comprises an isolated nucleic acid and which can be used to deliver the isolated nucleic acid to the interior of a cell. Numerous vectors are known in the art including, but not limited to, linear polynucleotides, polynucleotides associated with ionic or amphiphilic compounds, plasmids, and viruses. Thus, the term “vector” includes an autonomously replicating plasmid or a virus. The term should also be construed to include non-plasmid and non-viral compounds which facilitate transfer of nucleic acid into cells, such as, for example, polylysine compounds, liposomes, and the like. Examples of viral vectors include, but are not limited to, adenoviral vectors, adeno-associated virus vectors, retroviral vectors, and the like.

[0087] An “adeno-associated virus” or “AAV” is a non-enveloped, single-stranded DNA a Dependoparvovirus (genus) within the Parvoviridae family of viruses. In contrast to most other members of the Parvoviridae family, AAV is replication defective and is only able to replicate efficiently in the presence of a helper virus such as adenovirus or herpes virus. AAV was first reported in the mid 1960's as a contaminant of viral preparations of adenovirus. See Atchison et al Science. (1965) 149:754-756. Since then, progressively safer and more effective methods to use AAV as a recombinant DNA vector have been developed. See, e.g., Hermonat et al. PNAS (1984) 81:6466-6470; Laughlin et al. (1983) Gene 23:65-73; Matsushita et al. (1998) Gene Ther. 5:938-945; Xiao et al. (1998) J. Virol. 72:2224-2232. It has been reported that low numbers of AAV genomes can integrate into the host chromosome. Cheung et al. (1980) J. Virol. 33:739-748.

[0088] As used herein, the term “adeno-associated virus” or “AAV” includes but is not limited to, serotypes AAV type 1, AAV type 2, AAV type 3 (including types 3 and 3B), AAV type 4, AAV type 5, AAV type 6, AAV type 7, AAV type 8, AAV type 9, AAV type 10, AAV type 11, AAV type 12, AAV type 13, snake AAV, avian AAV, bovine AAV, canine AAV, equine AAV, ovine AAV, goat AAV, shrimp AAV, primate AAV, non-primate AAV, and those AAV serotypes and clades disclosed by Gao et al. (2004) J. Virol. 78:6381 and Moris et al. (2004) Virol. 33:375 (2004), and any other AAV known in the art. “Primate AAV” refers to AAV that infect primates, “non-primate AAV” refers to AAV that infect non-primate mammals, “bovine AAV” refers to AAV that infect bovine mammals, etc. See Fields et al. Virology, volume 2, chapter 69 (4th ed., Lippincott-Raven Publishers).

[0089] The term “Parvovirus” as used herein refers to any member of the Parvoviridae family. They have linear ssDNA genomes about 4-6 kilobases (kb) in length that typically contain two genes encoding for a replication initiator protein, called NS1, and the protein the viral capsid is made of. NS1 contains an HUH superfamily endonuclease domain near its N-terminus, containing both site-specific binding activity and site-specific nicking activity, and a superfamily 3 (SF3) helicase domain toward the C-terminus. The coding portion of the genome is flanked by telomeres at each end that form into hairpin loops that are important during replication. During replication, the hairpins repeatedly unfold, are replicated, and refold to change the direction of replication to progress back and forth along the genome in a process called rolling hairpin replication that produces a molecule containing numerous copies of the genome. Progeny ssDNA genomes are excised from this concatemer.

[0090] The coding portion of the genome of a parvovirus is flanked at each end by terminal sequences about 116-550 nucleotides (nt) in length that consist of imperfect palindromes folded into hairpin loop structures. These hairpin loops contain most of the cis-acting information required for DNA replication and packaging and act as hinges during replication to change the direction of replication. When the genome is converted to double-stranded forms, replication origin sites are created involving sequences in and adjacent to the hairpins.

[0091] In some aspects, the compositions and methods of the present disclosure can comprise any parvoviral NS1/Rep protein in the role of the Rep68 or Rep78 disclosed herein, and any telomeric palindromic hairpin loop in the role of the ITR disclosed herein. Thus, in some aspects of the present disclosure the terms Rep, Rep68, or Rep78 can refer to an orthologous sequence of the AAV2 Rep68 protein or the AAV2 Rep78 protein or a nucleic acid sequence encoding said proteins from any of the parvovirus genomes disclosed herein. In some aspects of the present disclosure the terms Rep, Rep68, or Rep78 can refer to an orthologous sequence of the AAV2 Rep68 protein or AAV2 Rep78 protein or nucleic acid sequence encoding said proteins from any of the parvovirus genomes disclosed herein, wherein the Rep protein (e.g., Rep68 or Rep78) is a functional variant or functional fragment that contains a Rep_N Rep protein catalytic-like domain (Interpro IPR014835). In some aspects of the present disclosure the terms Rep, Rep68, or Rep78 can refer to a protein or nucleic acid sequence encoding said protein that contains a Rep_N Rep protein catalytic-like domain (Interpro IPR014835).

[0092] In some aspects of the present disclosure the term ITR can refer to orthologous sequences of the AAV2 ITR sequences from any of the parvovirus genomes disclosed herein. As used herein, the terms “orthologous,” “ortholog,” and grammatical variants thereof refer to refers to a gene from a different species that encodes a similar protein that performs the same biological function. The term also refers to the protein encoded by the gene. For example, the Rep78 genes from, for example, two different species of parvovirus are orthologs.

[0093] Within each ITR there are two sequences required for replication: a Rep binding sequence (RBS) consisting of tetranucleotide direct repeats, and a terminal resolution site (trs) where Rep cleaves the viral DNA. In the presence of ATP and a divalent metal ion, Rep78 and Rep68 bind to and nick linear double-stranded (ds) DNA substrates that contain an RBS and a trs, indicating that the entire ITR is not required for these Rep activities. See Nash et al. (2009) J. Virol. 83: 454-469; Hickman et al. (2002) Mol. Cell 10: 327-33; Chiorini et al. (1994) J. Virol. 68:7448-7457; and Chiorini et al. (1994) J. Virol. 68:797-804, which are herein incorporated by reference.

[0094] Thus, in some aspects of the present disclosure, the term ITR can refer to orthologous sequences of the AAV2 ITR sequences from any of the parvovirus genomes disclosed herein wherein the sequence is a functional variant or functional fragment comprising a Rep-binding element (RBE) and a terminal resolution site (trs).

[0095] As used herein, the term “fragment,” e.g., a fragment of a Rep78 or a fragment of an ITR disclosed herein, refers to a sequence (polypeptide or polynucleotide) that is shorter than a sequence disclosed herein (e.g., an mRNA encoding AAV2 Rep78, a Rep78 protein, or a naturally occurring ITR capable of binding to a Rep78 protein) by deleting a portion of the sequence disclosed herein (e.g., 5′-end and/or 3′-end and/or internal deletion of a polynucleotide disclosed herein, or C-terminus and/or N-terminus and/or internal deletion of a polypeptide disclosed herein). In some aspects, the fragment is a subsequence of a naturally occurring polypeptide or polynucleotide.

[0096] As used herein, the term “functional fragment” refers to a polynucleotide fragment or a protein fragment derived from a polynucleotide or polypeptide sequence disclosed herein that retains at least part of the functional characteristics of the original polynucleotide or polypeptide that are necessary for their use in the compositions and methods closed herein. Conversely, a “non-functional fragment” would lack one or more of the functional characteristics of the parent molecule and therefore it is not suitable for use in the compositions and methods closed herein.

[0097] Whether a fragment of a polynucleotide or polypeptide disclosed herein is a functional fragment can be assessed by any art known methods without undue experimentation. In some aspects, the functional fragment retains, e.g., at least about 20%, at least about 30%, at least about 40%, at least about 50%, at least about 60%, at least about 70%, at least about 80%, at least about 90% or at least about 100% of the ability of an ITR or Rep78/Rep68 polynucleotide or Rep78/Rep68 polypeptide to effectively deliver a gene of interest according to the methods disclosed herein and promote sustained transgene expression with respect to an unmodified ITR or Rep78/Rep68 polynucleotide or Rep78/Rep68 polypeptide.

[0098] As used herein, the term “functional variant” refers to a polynucleotide or polypeptide derived from a polynucleotide or polypeptide disclosed herein, e.g., via point mutation, insertion, deletion, etc., that retains at least part of the function of the original polynucleotide or polypeptide and can be used in the compositions and methods disclosed herein. For example, in some aspects, a functional variant of a Rep78 protein encoded by a functional variant disclosed herein, retains the ability to bind to an ITR and to deliver a gene of interest according to the methods disclosed herein and promote sustained transgene expression. Conversely, a “non-functional variant” would lack one or more of the functional characteristics of the parent molecule.

[0099] Whether a variant of a polynucleotide or polypeptide disclosed herein is a functional variant can be assessed by any art known methods without undue experimentation. In some aspects, the functional variant retains, e.g., at least about 20%, at least about 30%, at least about 40%, at least about 50%, at least about 60%, at least about 70%, at least about 80%, at least about 90% or at least about 100% of the ability of an ITR or Rep78/Rep68 (i.e., Rep78 or Rep68) polynucleotide or Rep78/Rep68 polypeptide to effectively deliver a gene of interest according to the methods disclosed herein with respect to an unmodified ITR or Rep78/Rep68 polynucleotide or Rep78/Rep68 polypeptide.

[0100] The term “Dependoparvovirus” as used herein is interchangeable with the terms Dependovirus or Adenoassociated virus group and refers to the genus in the subfamily Parvovirinae of the virus family Parvoviridae that comprises the AAV viruses disclosed herein. AAV viruses receive their name because they cannot replicate productively in their host cell without the cell being coinfected by a helper virus such as an adenovirus, a herpesvirus, or a vaccinia virus. The Dependoparvovirus genus comprises eleven recognized species: Adeno-associated dependoparvovirus A, Adeno-associated dependoparvovirus B, Anseriform dependoparvovirus 1, Avian dependoparvovirus 1, Carnivore dependoparvovirus 1, Chiropteran dependoparvovirus 1, Pinniped dependoparvovirus 1, Rodent dependoparvovirus 1, Rodent dependoparvovirus 2, Squamate dependoparvovirus 1, and Squamate dependoparvovirus 2.

[0101] Dependoparvovirus is not infectious enough to trigger an immune response; this makes it a good virus to use as a gene therapy tool. Since this virus does not stimulate an immune response it can be used multiple times effectively without being neutralized before infection. Another reason these viruses are reliable vectors is the known insertion point for the genome. This virus always inserts its contents into the same place on chromosome 19. This predictability can cut down on the chances of inserting into an important area that might disrupt normal gene function or increase the risk of developing cancer.

[0102] As used herein, an antigen binding polypeptide or antigen binding polypeptide complex (e.g., an antibody or antigen binding fragment thereof), or region or domain thereof that “specifically binds” refers to its association with an epitope by its antigen binding domain, and that the binding entails some complementarity between the antigen binding domain and the epitope. Specific binding to an epitope occurs where there is binding to that epitope via its antigen binding domain more readily than there would be binding to a random, unrelated epitope.

[0103] In some aspects, the compositions and methods of the present disclosure can comprise any dependoparvoviral NS1/Rep protein in the role of the Rep68 or Rep78 disclosed herein, and any telomeric palindromic hairpin loop from any devendoparvovirus in the role of the ITR disclosed herein.

[0104] As used herein, an “epitope” refers to a localized region of an antigen to which an antigen binding polypeptide or antigen binding polypeptide complex (e.g., antibody or antigen binding fragment thereof) can specifically bind. An epitope can be, for example, contiguous amino acids of a polypeptide (linear or contiguous epitope) or an epitope can, for example, come together from two or more non-contiguous regions of a polypeptide or polypeptides (conformational, non-linear, discontinuous, or non-contiguous epitope). In some aspects, the epitope to which an antibody or antigen-binding fragment thereof binds can be determined by, e.g., NMR spectroscopy, X-ray diffraction crystallography studies, ELISA assays, hydrogen/deuterium exchange coupled with mass spectrometry (e.g., liquid chromatography electrospray mass spectrometry), array-based oligo-peptide scanning assays, and/or mutagenesis mapping (e.g., site-directed mutagenesis mapping). See, e.g., Giege R et al., (1994) Acta Crystallogr D Biol Crystallogr 50(Pt 4):339-350; McPherson (1990) Eur. J. Biochem. 189:1-23; Chayen (1997) Structure 5:1269-1274; McPherson (1976) J. Biol. Chem. 251:6300-6303; Meth. Enzymol. (1985) volumes 114 & 115, eds. Wyckoff et al., U.S. Pub. No. 2004/0014194, Bricogne G (1993) Acta Crystallogr D Biol Crystallogr 49(Pt 1):37-60, Bricogne G (1997) Meth. Enzymol. 276A:361-423, ed. Carter, Roversi et al. (2000) Acta Crystallogr D Biol Crystallogr 56(Pt 10):1316-1323 (X-ray diffraction crystallography studies); Champe et al. (1995) J. Biol. Chem. 270:1388-1394, and Cunningham & (1989) Science 244:1081-1085 (mutagenesis mapping).

[0105] Specific binding can be represented by a “binding affinity.” Binding affinity refers to an intrinsic binding affinity which reflects a 1:1 interaction between members of a binding pair (e.g., an antigen binding polypeptide complex and an antigen). Binding affinity can be measured and/or expressed in several ways known in the art, including, but not limited to, equilibrium dissociation constant (KD). KD is calculated from the quotient of koff/kon, where kon refers to the association rate constant of, e.g., an antigen binding polypeptide complex to an antigen, and koff refers to the dissociation of, e.g., an antigen binding polypeptide complex from an antigen. The kon and koff can be determined by techniques known to one of ordinary skill in the art, such as Octet® BLI, BIAcore® or KinExA. Accordingly, in some aspects, an antigen binding polypeptide complex provided herein is an antibody or antigen binding fragment thereof. In some aspects, an antigen binding polypeptide provided herein is part of an antibody or antigen-binding fragment thereof. In some aspects, the antibody or antigen binding fragment thereof specifically binds to an antigen with an equilibrium dissociation constant (KD) of from about 10 μM to about 1 pM.

[0106] A “capsid-free” or “capsid-less” (or variations thereof) vector or nucleic acid molecule refers to a nucleic acid molecule or vector construct that is free of a capsid, e.g., free of a viral capsid. In some aspects, “capsid-free” or “capsid-less” (or variations thereof) vector or nucleic acid molecule refers to a nucleic acid molecule or vector construct that is free of a capsid protein. For example, a nucleic acid molecule or vector can comprise a nucleic acid sequence of a virus genome while not containing any nucleic acid sequences encoding a viral capsid protein or fragment thereof. A composition can comprise a nucleic acid molecule or vector comprising a nucleic acid sequence of a viral genome while not containing any polypeptide sequences of a viral capsid protein or fragment thereof. E.g., the capsid-less vector or nucleic acid molecule does not contain sequences encoding an AAV Cap protein or AAV capsid protein amino acid sequences.

### AAV-ITR Based Gene Delivery System

[0107] In some aspects, the present disclosure provides an AAV-ITR based gene delivery system comprising (i) a first linear vector comprising a dsDNA comprising a genetic cassette comprising a polynucleotide encoding a therapeutic polypeptide (e.g., a CAR or antibody), a therapeutic polynucleotide, or a combination thereof (e.g., a gene editing system comprising a Cas protein and a gRNA) flanked by AAV ITRs, named “AAV-ITR vector” throughout this disclosure; and, (ii) a linear mRNA encoding an AAV Rep protein, e.g., Rep68 or Rep78, named “Rep vector” throughout this disclosure.

[0108] In other aspects, the present disclosure provides a capsid-free AAV-ITR based gene delivery system comprising (i) a first linear vector comprising a dsDNA comprising a genetic cassette comprising a polynucleotide encoding a therapeutic polypeptide (e.g., a CAR or antibody), a therapeutic polynucleotide, or a combination thereof (e.g., a gene editing system comprising a Cas protein and a gRNA) flanked by AAV ITRs, named “AAV-ITR vector” throughout this disclosure; and, (ii) a linear mRNA encoding an AAV Rep protein, e.g., Rep68 or Rep78, named “Rep vector” throughout this disclosure.

[0109] Accordingly, the terms “AAV-ITR based gene delivery system” and “AAV-ITR based gene delivery system of the present disclosure refers to the combination of a first linear vector comprising a dsDNA comprising a genetic cassette comprising a polynucleotide encoding a therapeutic polypeptide (e.g., a CAR or antibody), a therapeutic polynucleotide, or a combination thereof flanked by AAV ITRs, e.g., AAV2 ITRs, and a second linear mRNA vector encoding an AAV Rep protein, e.g., an AAV2 Rep78 or Rep68 protein.

[0110] The term “AAV-ITR vector,” referred to also using the terms “ITR_GOI vector” or “AAV ITR_GOI vector” refers, e.g., to an AAV genome in which all of the rep and cap genes have been replaced with heterologous sequences, and wherein the heterologous sequences are located between the AAV ITRs. In other words, the AAV-ITR vector of the present disclosure is a construct in which the only two AAV components are the ITRs. This reflects the fact that the only cis-element required for the production of AAV genomes are the AAV ITRs. Thus, in some aspects disclosed herein, an AAV-ITR vector contain only a polynucleotide encoding a therapeutic polypeptide (e.g., a CAR or antibody), a therapeutic polynucleotide, or a combination thereof flanked by the ITRs.

[0111] In some aspects the AAV-ITR vector can include one or more regulatory sequences. In some aspects, the regulatory sequences are flanked by the ITRs. In some aspects the AAV-ITR vector can include a non-coding regulatory DNA. In some aspects, the AAV-ITR vector comprises a genetic cassette comprising a regulatory sequence or regulatory element that controls expression of a therapeutic polypeptide, a therapeutic polynucleotide, or a combination thereof.

[0112] The terms “regulatory sequence” and “regulatory element” are used interchangeably and are intended to include promoters, enhancers, introns, and other expression control elements (e.g., polyadenylation signals) that control the transcription or translation of a polynucleotide sequence that encodes a therapeutic polypeptide, a therapeutic polynucleotide, or a combination thereof. Such regulatory sequences are described, for example, in Goeddel (Gene Expression Technology. Methods in Enzymology 185, Academic Press, San Diego, CA (1990)). It will be appreciated by those skilled in the art that the design of the AAV-ITR vector, including the selection of regulatory sequences, can depend on such factors, e.g., the choice of the host cell to be transformed, or the level of expression of protein desired.

[0113] In some aspects, the AAV-ITR vector comprises mRNA splice donor/splice acceptor sites. Preferred regulatory sequences for mammalian host cell expression include viral elements that direct high levels of protein expression in mammalian cells, such as promoters and/or enhancers derived from cytomegalovirus (CMV), Simian Virus 40 (SV40), adenovirus, (e.g., the adenovirus major late promoter or AdMLP) and polyoma. Alternatively, nonviral regulatory sequences can be used, such as the ubiquitin promoter or β-globin promoter. Still further, regulatory elements composed of sequences from different sources, such as the SRa promoter system, which contains sequences from the SV40 early promoter and the long terminal repeat of human T cell leukemia virus type 1 (Takebe et al. (1988) Mol. Cell. Biol. 8:466-472), can be used.

[0114] In some aspects, the regulatory elements in the AAV-ITR vector can be constitutive. In some aspects, the regulatory elements in the AAV-ITR vector can be regulatable. In some aspects, the regulatory elements in the AAV-ITR vector can be tissue-specific. In certain aspects, the regulatory sequence comprises a tissue-specific promoter. In some aspects, the tissue specific promoter drives expression of the gene of interest in a tissue selected from the group consisting of heart, liver, lungs, eyes, nervous system, lymphatic system, muscle and stem cells.

[0115] In some aspects, an AAV-ITR vector can include additional regulatory elements including an intron and/or a polyadenylation signal. In some aspects, the intron is located 5′ of the polynucleotide sequence encoding the therapeutic polypeptide, therapeutic polynucleotide, or combination thereof. In some aspects, the polyadenylation signal is located 3′ of the polynucleotide sequence encoding the therapeutic polypeptide, therapeutic polynucleotide, or combination thereof. A representative structure of an AAV-ITR vector is presented in FIG. 2A.

[0116] As used herein, the term “Rep vector” refers to a linear mRNA encoding an AAV Rep protein, e.g., AAV2 Rep78 or AAV2 Rep68. In some aspects the Rep vector can include regulatory elements such as expression control elements (e.g., promoters or enhancers) that drive the translation of the polynucleotide sequence encoding the Rep78 or Rep68 protein. In some aspects, a Rep vector can include a promoter, 5′ UTR, 3′ UTR, and a polyadenine tail. A representative structure of a Rep vector is presented in FIG. 2B.

[0117] In some aspects, the Rep vector comprises an mRNA encoding a Rep78 protein, i.e., the Rep vector is a Rep78 vector. In some aspects, the Rep vector comprises an mRNA encoding a Rep68 protein, i.e., the Rep vector is a Rep68 vector. In some aspects, the Rep vector comprises an mRNA encoding an AAV2 Rep78 protein, i.e., the Rep vector is an AAV2 Rep78 vector. In some aspects, the Rep vector comprises an mRNA encoding an AAV2 Rep68 protein, i.e., the Rep vector is an AAV2 Rep68 vector.

[0118] In some aspects, the topology of the AAV-ITR vector corresponds to Schema I

[ITRL]-[E]-[P]-[I]-[GOI]-[P(A) signal]-[ITRR] Schema I

wherein:
[0119] ITRL and ITRR are ITRs, and ITRR is the reverse complement if ITRL;
[0120] E is an enhancer;
[0121] P is a promoter;
[0122] I is an intron;
[0123] GOI is a polynucleotide sequence encoding a therapeutic polypeptide, a therapeutic
[0124] polynucleotide, or a combination thereof, and,
[0125] P(A) signal is a polyadenylation signal.

[0126] In some aspects, the ITR can be an ITR from AAV2. In other aspects, the ITR can be from an AAV serotype selected from the group consisting of AAV1, AAV2, AAV3, AAV3B, AAV4, AAV5, AAV6, AAV7, AAV8, AAV9, AAV10, AAV11, AAV12 and AAV13. ITR that can be used in the AAV-ITR based gene delivery systems of the present disclosure are discussed more in detail in a specific section below.

[0127] In some aspects, the enhancer/promoter is CMV. In some aspects, the enhancer/promoter is mouse CMV. In some aspects, the PolyA signal is a PolyA signal derived from bovine growth hormone mRNA. In some aspects, the Poly A is a rabbit beta-globin Poly A signal. In some aspects, the Poly A is an SV40 Poly A signal.

[0128] In some aspects, the AAV-ITR vector is an AAV2 ITR_CMVR_EGFP_Tbgh vector (SEQ ID NO:35), which comprises an ORF sequence encoding Enhanced Green Fluorescent Protein (EGFP) (SEQ ID NO:36). The ORF encoding EGPF in the AAV2 ITR_CMVR_EGFP_Tbgh vector can be replaced with a polynucleotide encoding a GOI.

[0129] The architecture of the AAV-ITR vector is shown in the table below.

TABLE 1
Architecture of the AAV-ITR vector of SEQ ID NO: 35.

| Component | Position (nt) |
|---|---|
| AAV2 3′ ITR | 10-139 |
| CMV enhancer | 244-696 |
| CMV promoter | 697-985 |
| HTLV R region | 986-1216 |
| CMV IE intron | 1217-1324 |
| EGFP | 1379-2098 |
| Poly A | 2111-2661 |
| AAV2 5′ ITR | 2713-2842 |

[0130] Thus, in some aspects, an AVV-ITR vector of the present disclosure comprises the sequence of the AAV-ITR disclosed above in which the coding sequence between positions 1379 and 2098 has been replaced with a coding sequence (CDS) encoding a payload such as an antibody (e.g., an MSTAR antibody) or a CAR. The polynucleotide sequence encoding EGFP in the AAV-ITR vector of SEQ ID NO:35 can be replaced with a polynucleotide encoding a therapeutic polypeptide, therapeutic polynucleotide, or combination using recombinant techniques known in the art. The ITR sequences in the AAV-ITR vector of SEQ ID NO:35 can be replaced with other parvoviral ITR sequences known in the art.

[0131] In some aspects, the topology of the Rep vector corresponds to Schema II

[P]-[5′ UTR]-[Rep78/68]-[3′ UTR]-[P(A) tail] Schema II

wherein:
[0132] P is a promoter;
[0133] 5′ UTR is a 5′ untranslated region;
[0134] 3′ UTR is a 3′ untranslated region;
[0135] Rep78/68 is a polynucleotide sequence encoding a Rep68 or Rep68 protein; and,
[0136] P(A) tail is a polyadenylation tail.

[0137] In some aspects, the promoter of the Rep vector is a T7 promoter. The T7 promoter is a sequence of DNA 18 base pairs long up to transcription start site at +1 having the sequence taatacgactcactatag (SEQ ID NO:37) that is recognized by T7 RNA polymerase. Only the full-length Rep78 protein and alternatively spliced variant Rep68 can replicate an AAV-ITR linear dsDNA vector. Any 5′ UTR or 3′ UTR from an eukaryotic mRNA can be used in the Rep vectors of the present disclosure. In some aspects, the Rep vector is an AAV2_REP78_IVT vector of SEQ ID NO: 38. In some aspects, the Rep78 sequence encoded by the AAV2_REP78_IVT vector comprises the sequence set forth in SEQ ID NO: 39. Thus, in some aspects, the Rep78 protein corresponds to the Genbank QDH44117.1. A detailed description of the architecture of the Rep vector AAV2_REP78_IVT (SEQ ID NO: 38) is presented in TABLE 2, below.

TABLE 2
Detailed structure of the Rep vector of SEQ ID NO: 38.

| Component | Position (nt) |
|---|---|
| TEV | 1-135 |
| AAV2 Rep78 | 136-2002 |
| hbGlobin 3′ UTR | 2011-2070 |
| PolyA | 2171-2270 |

[0138] The RNA sequence encoding the Rap78 protein in the Rep vector of SEQ ID NO: 38 can be replaced with an RNA encoding an AAV2 Rep68 protein or any homologous parvoviral Rep protein using recombinant techniques known in the art. In some aspects, the Rep protein can be a Rep78 from AAV2. In other aspects, the Rep protein can be a Rep78 from an AAV serotype selected from the group consisting of AAV1, AAV2, AAV3, AAV3B, AAV4, AAV5, AAV6, AAV7, AAV8, AAV9, AAV10, AAV11, AAV12 and AAV13. In some aspects, the Rep protein can be a Rep68 from AAV2. In other aspects, the Rep protein can be a Rep68 from an AAV serotype selected from the group consisting of AAV1, AAV2, AAV3, AAV3B, AAV4, AAV5, AAV6, AAV7, AAV8, AAV9, AAV10, AAV11, AAV12 and AAV13. Rep68 and Rep78 polynucleotides encoding Rep68 and Rep78 proteins that can be used in the AAV-ITR based gene delivery systems of the present disclosure are discussed more in detail in a specific section below.

[0139] In some aspects, the ITR of the AAV-ITR vector and the Rep78 mRNA of the Rep vector of an AAV-ITR based gene delivery system of the present disclosure are from AAV1. In some aspects, the ITR of the AAV-ITR vector and the Rep78 mRNA of the Rep vector of an AAV-ITR based gene delivery system of the present disclosure are from AAV2. In some aspects, the ITR of the AAV-ITR vector and the Rep78 mRNA of the Rep vector of an AAV-ITR based gene delivery system of the present disclosure are from AAV3. In some aspects, the ITR of the AAV-ITR vector and the Rep78 mRNA of the Rep vector of an AAV-ITR based gene delivery system of the present disclosure are from AAV3B. In some aspects, the ITR of the AAV-ITR vector and the Rep78 mRNA of the Rep vector of an AAV-ITR based gene delivery system of the present disclosure are from AAV4. In some aspects, the ITR of the AAV-ITR vector and the Rep78 mRNA of the Rep vector of an AAV-ITR based gene delivery system of the present disclosure are from AAV5. In some aspects, the ITR of the AAV-ITR vector and the Rep78 mRNA of the Rep vector of an AAV-ITR based gene delivery system of the present disclosure are from AAV6. In some aspects, the ITR of the AAV-ITR vector and the Rep78 mRNA of the Rep vector of an AAV-ITR based gene delivery system of the present disclosure are from AAV7. In some aspects, the ITR of the AAV-ITR vector and the Rep78 mRNA of the Rep vector of an AAV-ITR based gene delivery system of the present disclosure are from AAV8. In some aspects, the ITR of the AAV-ITR vector and the Rep78 mRNA of the Rep vector of an AAV-ITR based gene delivery system of the present disclosure are from AAV9. In some aspects, the ITR of the AAV-ITR vector and the Rep78 mRNA of the Rep vector of an AAV-ITR based gene delivery system of the present disclosure are from AAV10. In some aspects, the ITR of the AAV-ITR vector and the Rep78 mRNA of the Rep vector of an AAV-ITR based gene delivery system of the present disclosure are from AAV11. In some aspects, the ITR of the AAV-ITR vector and the Rep78 mRNA of the Rep vector of an AAV-ITR based gene delivery system of the present disclosure are from AAV12. In some aspects, the ITR of the AAV-ITR vector and the Rep78 mRNA of the Rep vector of an AAV-ITR based gene delivery system of the present disclosure are from AAV13.

[0140] In some aspects, the ITR of the AAV-ITR vector and the Rep68 mRNA of the Rep vector of an AAV-ITR based gene delivery system of the present disclosure are from AAV1. In some aspects, the ITR of the AAV-ITR vector and the Rep68 mRNA of the Rep vector of an AAV-ITR based gene delivery system of the present disclosure are from AAV2. In some aspects, the ITR of the AAV-ITR vector and the Rep68 mRNA of the Rep vector of an AAV-ITR based gene delivery system of the present disclosure are from AAV3. In some aspects, the ITR of the AAV-ITR vector and the Rep68 mRNA of the Rep vector of an AAV-ITR based gene delivery system of the present disclosure are from AAV3B. In some aspects, the ITR of the AAV-ITR vector and the Rep68 mRNA of the Rep vector of an AAV-ITR based gene delivery system of the present disclosure are from AAV4. In some aspects, the ITR of the AAV-ITR vector and the Rep68 mRNA of the Rep vector of an AAV-ITR based gene delivery system of the present disclosure are from AAV5. In some aspects, the ITR of the AAV-ITR vector and the Rep68 mRNA of the Rep vector of an AAV-ITR based gene delivery system of the present disclosure are from AAV6. In some aspects, the ITR of the AAV-ITR vector and the Rep68 mRNA of the Rep vector of an AAV-ITR based gene delivery system of the present disclosure are from AAV7. In some aspects, the ITR of the AAV-ITR vector and the Rep68 mRNA of the Rep vector of an AAV-ITR based gene delivery system of the present disclosure are from AAV8. In some aspects, the ITR of the AAV-ITR vector and the Rep68 mRNA of the Rep vector of an AAV-ITR based gene delivery system of the present disclosure are from AAV9. In some aspects, the ITR of the AAV-ITR vector and the Rep68 mRNA of the Rep vector of an AAV-ITR based gene delivery system of the present disclosure are from AAV10. In some aspects, the ITR of the AAV-ITR vector and the Rep68 mRNA of the Rep vector of an AAV-ITR based gene delivery system of the present disclosure are from AAV11. In some aspects, the ITR of the AAV-ITR vector and the Rep68 mRNA of the Rep vector of an AAV-ITR based gene delivery system of the present disclosure are from AAV12. In some aspects, the ITR of the AAV-ITR vector and the Rep68 mRNA of the Rep vector of an AAV-ITR based gene delivery system of the present disclosure are from AAV13.

[0141] In some aspects, the ITR of the AAV-ITR vector can be selected from an AAV serotype selected from the group consisting of AAV1, AAV2, AAV3, AAV3B, AAV4, AAV5, AAV6, AAV7, AAV8, AAV9, AAV10, AAV11, AAV12 and AAV13, and the Rep78 mRNA of the Rep vector can be selected from an AAV serotype selected from the group consisting of AAV1, AAV2, AAV3, AAV3B, AAV4, AAV5, AAV6, AAV7, AAV8, AAV9, AAV10, AAV11, AAV12 and AAV13. In some aspects, the ITR of the AAV-ITR vector can be selected from an AAV serotype selected from the group consisting of AAV1, AAV2, AAV3, AAV3B, AAV4, AAV5, AAV6, AAV7, AAV8, AAV9, AAV10, AAV11, AAV12 and AAV13, and the Rep68 mRNA of the Rep vector can be selected from an AAV serotype selected from the group consisting of AAV1, AAV2, AAV3, AAV3B, AAV4, AAV5, AAV6, AAV7, AAV8, AAV9, AAV10, AAV11, AAV12 and AAV13.

[0142] The AAV-ITR based gene delivery system of the present disclosure can be generally described as an AAV-ITR vector comprising a linear DNA fragment flanked by two Parvo virus ITR (e.g., AAV2 ITR) wherein the linear dsDNA fragment comprises a transcription unit for expression of a gene of interest, and wherein the AAV-ITR vector is co-delivered with a Rep vector comprising a Parvo viral replicase mRNA (e.g., Rep78 of AAV2) for transient transcription of the replicase. The replication of the linear AAV-ITR vector only requires Rep68/78 and host cell proteins such as Polymerase δ (Pol δ), Replication Factor C (RFC), Proliferating Cell Nuclear Antigen (PCNA) and MCM complex in dividing cells. In some aspects, the AAV-base gene delivery system of the present disclosure can express two or more therapeutic polypeptides, therapeutic polynucleotides, or combinations thereof using a bicistronic element or 2A peptide.

[0143] The linear parvovirus AAV-ITR vector can be temporarily amplified by co-delivery with the Rep vector encoding Rep68 or Rep78 mRNA, which would result in the transient expression of Rep68 or Rep78 protein, supporting the replication of the AAV-ITR vector in dividing cells. The increased copy number of the AAV-ITR DNA in transduced cells enhances the integration frequency of AAV-ITR DNA into host cell genome in the presence of Rep68 or Rep78, which results in higher percentage of persistent transgene expression in the target cell population.

[0144] In some aspects, the AAV-ITR vector and/or Rep vector are encapsulated in a delivery system. In some aspects, the delivery system is a lipidic delivery system, e.g., an LNP or liposome, or a polymeric delivery system, or combination thereof. In some aspects, the AAV-ITR based gene delivery system of the present disclosure can be directed to a specific cell (e.g., T cell) or tissue using the methods and targeting compositions disclose in U.S. Provisional Patent Application No. 63/594,875; filed Oct. 31, 2023, which is herein incorporated by reference in its entirety.

[0145] In some aspects, the AAV-ITR vector and/or Rep vector are encapsulated in a lipidic delivery system, in a polymeric delivery system, or in a combination thereof, e.g., one vector can be encapsulated in a lipidic delivery system and the other vector can be encapsulated in a polymeric delivery system, or each one can be encapsulated in a lipidic delivery system or polymeric delivery system, or both can be co-encapsulated in a single lipidic delivery system or polymeric delivery system.

[0146] As used herein, the term “lipidic delivery system” refers to a lipid-based delivery vehicle or set thereof such as liposomes, lipid nanoparticles, or combinations thereof that that encapsulates a nucleic acid (e.g., a dsDNA, an mRNA, or both) and mediates the transfection of the nucleic acid into the cytoplasm of a target cell. As used herein, the term “polymeric delivery system” refers to a synthetic or natural polymer or a combination thereof that is capable of interacting with a nucleic acid (e.g., a dsDNA, a mRNA, or both) and mediates the transfection of the nucleic acid into the cytoplasm of a target cell.

[0147] In some aspects, transfection of an AAV-ITR vector of the present disclosure into a target eukaryotic cell (e.g., a T cell) or tissue (e.g., muscle) by using a lipidic or polymeric delivery systems or other methods known in the art (e.g., electroporation or calcium phosphate-mediate transfection) results in the integration of the sequence flanked by the ITRs into the genome of the target cell. In some aspects, transfection of a Rep vector of the present disclosure into a target eukaryotic cell results in the transient expression of the Rep protein (e.g., AAV2 Rep78 or Rep68 or a functional fragment thereof). In some aspects, the duration of the transient expression of the Rep78 or Rep68 can be modulated by regulatory elements present in the Rep vector, e.g., promoters. In some aspects, the duration of the transient expression of the Rep78 or Rep68 can be modulated by the presence of chemical modifications (e.g., replacement of uridines with pseudouridines) in the sequence of the mRNA encoding the Rep78 or Rep68 protein, wherein the chemical modifications alter (e.g., improve) the resistance of the mRNA by endogenous nucleases in the target cell.

[0148] Modified mRNAs: In some aspects, the expression of the Rep protein encoded by the Rep vector can be modulated by incorporating nucleotides analogues that increase the resistance of the mRNA encoding the Rep protein to endonucleases. In some aspects, the mRNA encoding the Rep protein, e.g., a Rep78 or Rep68 protein, comprises non-naturally occurring nucleotide analogues, e.g., nucleotides which have modified sugar moieties, such as bicyclic nucleotides or 2′ modified nucleotides, such as 2′ substituted nucleotides. The replacement of naturally occurring nucleotides with non-naturally analogues can confer desirable characteristics or properties to the mRNA, for example, increased resistance to degradation or stability. In some aspects, the nucleotide analogues increase resistance to intracellular nucleases and/or increase ease of transport into the cell. Specific examples of nucleoside analogues are described by, e.g. Freier & Altmann (1997) Nucl. Acid Res. 25:4429-4443, and Uhlmann (2000) Curr. Opinion in Drug Development 3:293-213.

[0149] The present disclosure provides for modified nucleosides and nucleotides of a mRNA polynucleotide encoding a Rep78 or Rep68 protein. A “nucleoside” refers to a compound containing a sugar molecule (e.g., a pentose or ribose) or a derivative thereof in combination with an organic base (e.g., a purine or pyrimidine) or a derivative thereof (also referred to herein as “nucleobase”). A nucleotide” refers to a nucleoside, including a phosphate group. Modified nucleotides can by synthesized by any useful method, such as, for example, chemically, enzymatically, or recombinantly, to include one or more modified or non-natural nucleosides. Polynucleotides can comprise a region or regions of linked nucleosides. Such regions can have variable backbone linkages. The linkages can be standard phosphodiester linkages, in which case the polynucleotides would comprise regions of nucleotides.

[0150] The modified polynucleotides disclosed herein can comprise various distinct modifications. In some aspects, the modified polynucleotides can contain one, two, or more (optionally different) nucleoside or nucleotide modifications. In some aspects, a modified polynucleotide, introduced to a cell can exhibit one or more desirable properties, e.g., improved protein expression, reduced immunogenicity, or reduced degradation in the cell, as compared to an unmodified polynucleotide.

[0151] Structural Modifications: In some aspects, the mRNA polynucleotide encoding a Rep78 or Rep68 protein or a functional fragment or variant thereof is structurally modified. As used herein, a “structural” modification is one in which two or more linked nucleosides are inserted, deleted, duplicated, inverted or randomized in a polynucleotide without significant chemical modification to the nucleotides themselves. Because chemical bonds will necessarily be broken and reformed to effect a structural modification, structural modifications are of a chemical nature and hence are chemical modifications. However, structural modifications will result in a different sequence of nucleotides. For example, the polynucleotide “ATCG” can be chemically modified to “AT-5meC-G”. The same polynucleotide can be structurally modified from “ATCG” to “ATCCCG”. Here, the dinucleotide “CC” has been inserted, resulting in a structural modification to the polynucleotide.

[0152] Chemical Modifications: In some aspects, the mRNA polynucleotide encoding a Rep78 or Rep68 protein or a functional fragment or variant thereof is chemically modified. As used herein in reference to a polynucleotide, the terms “chemical modification” or, as appropriate, “chemically modified” refer to modification with respect to adenosine (A), guanosine (G), uridine (U), thymidine (T) or cytidine (C) ribo- or deoxyribonucleosides in one or more of their position, pattern, percent or population. Generally, herein, these terms are not intended to refer to the ribonucleotide modifications in naturally occurring 5′-terminal mRNA cap moieties.

[0153] In some aspects, the mRNA polynucleotide encoding a Rep78 or Rep68 protein or a functional fragment or variant thereof can have a uniform chemical modification of all or any of the same nucleoside type or a population of modifications produced by mere downward titration of the same starting modification in all or any of the same nucleoside type, or a measured percent of a chemical modification of all any of the same nucleoside type but with random incorporation, such as where all uridines are replaced by a uridine analog, e.g., 5-methoxyuridine. In another aspect, the polynucleotides can have a uniform chemical modification of two, three, or four of the same nucleoside type throughout the entire polynucleotide (such as all uridines and all cytosines, etc. are modified in the same way).

[0154] Modified nucleotide base pairing encompasses not only the standard adenosine-thymine, adenosine-uracil, or guanosine-cytosine base pairs, but also base pairs formed between nucleotides and/or modified nucleotides comprising non-standard or modified bases, wherein the arrangement of hydrogen bond donors and hydrogen bond acceptors permits hydrogen bonding between a non-standard base and a standard base or between two complementary non-standard base structures. One example of such non-standard base pairing is the base pairing between the modified nucleotide inosine and adenine, cytosine or uracil. Any combination of base/sugar or linker can be incorporated into polynucleotides of the present disclosure.

[0155] The skilled artisan will appreciate that, except where otherwise noted, polynucleotide sequences set forth in the instant application will recite “T”s in a representative DNA sequence but where the sequence represents RNA, the “T”s would be substituted for “U”s.

[0156] Base Modifications: Modifications of polynucleotides (e.g., RNA polynucleotides, such as mRNA polynucleotides) that are useful in the composition of the present disclosure are selected from the group consisting of pseudouridine (W), N1-methylpseudouridine (m1ψ), 2-thiouridine, 4′-thiouridine, 5-methylcytosine, 2-thio-1-methyl-1-deaza-pseudouridine, 2-thio-1-methyl-pseudouridine, 2-thio-5-aza-uridine, 2-thio-dihydropseudouridine, 2-thio-dihydrouridine, 2-thio-pseudouridine, 4-methoxy-2-thio-pseudouridine, 4-methoxy-pseudouridine, 4-thio-1-methyl-pseudouridine, 4-thio-pseudouridine, 5-aza-uridine, dihydropseudouridine, 5-methyluridine), 5-methoxyuridine and 2′-O-methyl uridine. In some aspects, the polynucleotide (e.g., RNA polynucleotide, such as mRNA polynucleotide) includes a combination of at least two (e.g., 2, 3, 4 or more) of the aforementioned modified nucleobases.

[0157] In some aspects, modified nucleobases in the polynucleotide (e.g., RNA polynucleotide, such as mRNA polynucleotide) are selected from the group consisting of 5-methoxyuridine (mo5U), 1-methyl-pseudouridine (m1ψ), 5-methyl-cytidine (m5C), pseudouridine (ψ), α-thio-guanosine and α-thio-adenosine. In some embodiments, the polynucleotide includes a combination of at least two (e.g., 2, 3, 4 or more) of the aforementioned modified nucleobases.

[0158] In some aspects, at least 95% of a type of nucleobases (e.g., uridine) in an mRNA polynucleotide encoding a Rep78 or Rep68 protein or a functional fragment or variant thereof have been replaced by one of the aforementioned modified nucleobases. In some aspects, at least 95% of uridine in an mRNA polynucleotide encoding a Rep78 or Rep68 protein or a functional fragment or variant thereof have been replaced by 5-methoxyuridine.

[0159] In some aspects, the mRNA polynucleotide encoding a Rep78 or Rep68 protein or a functional fragment or variant thereof comprises pseudouridine (W) and 5-methyl-cytidine (m5C). In some aspects, the mRNA polynucleotide encoding a Rep78 or Rep68 protein or a functional fragment or variant thereof comprises 5-methoxyuridine (5mo5U) and 5-methyl-cytidine (m5C). In some embodiments, the mRNA polynucleotide encoding a Rep78 or Rep68 protein or a functional fragment or variant thereof comprises 1-methyl-pseudouridine (m1ψ). In some aspects, the mRNA polynucleotide encoding a Rep78 or Rep68 protein or a functional fragment or variant thereof comprises 1-methyl-pseudouridine (m1ψ) and 5-methyl-cytidine (m5C). In some aspects, the mRNA polynucleotide encoding a Rep78 or Rep68 protein or a functional fragment or variant thereof comprises 2-thiouridine (s2U). In some aspects, the mRNA polynucleotide encoding a Rep78 or Rep68 protein or a functional fragment or variant thereof comprises 2-thiouridine and 5-methyl-cytidine (m5C). In some aspects, the mRNA polynucleotide encoding a Rep78 or Rep68 protein or a functional fragment or variant thereof comprises methoxy-uridine (mo5U). In some aspects, the mRNA polynucleotide encoding a Rep78 or Rep68 protein or a functional fragment or variant thereof comprises 5-methoxy-uridine (mo5U) and 5-methyl-cytidine (m5C). In some aspects, the mRNA polynucleotide encoding a Rep78 or Rep68 protein or a functional fragment or variant thereof comprises 2′-O-methyl uridine. In some aspects, the mRNA polynucleotide encoding a Rep78 or Rep68 protein or a functional fragment or variant thereof comprises 2′-O-methyl uridine and 5-methyl-cytidine (m5C). In some aspects, the mRNA polynucleotide encoding a Rep78 or Rep68 protein or a functional fragment or variant thereof comprises N6-methyl-adenosine (m6A). In some aspects, the mRNA polynucleotide encoding a Rep78 or Rep68 protein or a functional fragment or variant thereof comprises N6-methyl-adenosine (m6A) and 5-methyl-cytidine (m5C.

[0160] In some aspects, the mRNA polynucleotide encoding a Rep78 or Rep68 protein or a functional fragment or variant thereof is uniformly modified (e.g., fully modified, modified throughout the entire sequence) for a particular modification. For example, a polynucleotide can be uniformly modified with 5-methyl-cytidine (m5C), meaning that all cytosine residues in the mRNA sequence are replaced with 5-methyl-cytidine (m5C). Similarly, a polynucleotide can be uniformly modified for any type of nucleoside residue present in the sequence by replacement with a modified residue such as any of those set forth above.

[0161] In some aspects, the modified nucleobase is a modified cytosine. Examples of nucleobases and nucleosides having a modified cytosine include N4-acetyl-cytidine (ac4C), 5-methyl-cytidine (m5C), 5-halo-cytidine (e.g., 5-iodo-cytidine), 5-hydroxymethyl-cytidine (hm5C), 1-methyl-pseudoisocytidine, 2-thio-cytidine (s2C), 2-thio-5-methyl-cytidine. In some aspects, a modified nucleobase is a modified uridine. Example nucleobases and nucleosides having a modified uridine include 5-cyano uridine or 4′-thio uridine. In some aspects, a modified nucleobase is a modified adenine. Example nucleobases and nucleosides having a modified adenine include 7-deaza-adenine, 1-methyl-adenosine (m1A), 2-methyl-adenine (m2A), N6-methyl-adenosine (m6A), and 2,6-diaminopurine. In some aspects, a modified nucleobase is a modified guanine. Example nucleobases and nucleosides having a modified guanine include inosine (I), 1-methyl-inosine (m1I), wyosine (imG), methylwyosine (mimG), 7-deaza-guanosine, 7-cyano-7-deaza-guanosine (preQ0), 7-aminomethyl-7-deaza-guanosine (preQ1), 7-methyl-guanosine (m7G), 1-methyl-guanosine (m1G), 8-oxo-guanosine, 7-methyl-8-oxo-guanosine.

[0162] In some aspects, the mRNA polynucleotide encoding a Rep78 or Rep68 protein or a functional fragment or variant thereof is chemically modified by at least about 10%, at least about 20%, at least about 30%, at least about 40%, at least about 50%, at least about 60%, at least about 70%, at least about 80%, at least about 90%, at least about 95%, at least about 99%, or about 100%. In some aspects, the uridine nucleosides in the open reading frame encoding a Rep78 or Rep68 protein or a functional fragment or variant thereof are chemically modified by at least 10%, at least about 20%, at least about 30%, at least about 40%, at least about 50%, at least about 60%, at least about 70%, at least about 80%, at least about 90%, at least about 95%, at least about 99%, or about 100%. In some aspects, the adenine nucleosides in the open reading frame encoding a Rep78 or Rep68 protein or a functional fragment or variant thereof are chemically modified by at least about 10%, at least about 20%, at least about 30%, at least about 40%, at least about 50%, at least about 60%, at least about 70%, at least about 80%, at least about 90%, at least about 95%, at least about 99%, or about 100%. In some aspects, the cytosine nucleosides in the open reading frame encoding a Rep78 or Rep68 protein or a functional fragment or variant thereof are chemically modified by at least at least about 10%, at least about 20%, at least about 30%, at least about 40%, at least about 50%, at least about 60%, at least about 70%, at least about 80%, at least about 90%, at least about 95%, at least about 99%, or about 100%. In some aspects, the guanine nucleosides in the open reading frame encoding a Rep78 or Rep68 protein or a functional fragment or variant thereof are chemically modified by at least at least about 10%, at least about 20%, at least about 30%, at least about 40%, at least about 50%, at least about 60%, at least about 70%, at least about 80%, at least about 90%, at least about 95%, at least about 99%, or about 100%.

[0163] In some embodiments, the polynucleotides can include any useful linker between the nucleosides. Such linkers, including backbone modifications, that are useful in the composition of the present disclosure include, but are not limited to the following: 3′-alkylene phosphonates, 3′-amino phosphoramidate, alkene containing backbones, aminoalkylphosphoramidates, aminoalkylphosphotriesters, boranophosphates, —CH2-O—N(CH3)-CH2-, -CH2-N(CH3)-N(CH3)-CH2-, —CH2-NH—CH2-, chiral phosphonates, chiral phosphorothioates, formacetyl and thioformacetyl backbones, methylene (methylimino), methylene formacetyl and thioformacetyl backbones, methyleneimino and methylenehydrazino backbones, morpholino linkages, —N(CH3)-CH2-CH2-, oligonucleosides with heteroatom internucleoside linkage, phosphinates, phosphoramidates, phosphorodithioates, phosphorothioate internucleoside linkages, phosphorothioates, phosphotriesters, PNA, siloxane backbones, sulfamate backbones, sulfide sulfoxide and sulfone backbones, sulfonate and sulfonamide backbones, thionoalkylphosphonates, thionoalkylphosphotriesters, and thionophosphoramidates.

[0164] Sugar Modifications: The modified nucleosides and nucleotides (e.g., building block molecules), which can be incorporated into a mRNA polynucleotide encoding a Rep78 or Rep68 protein or a functional fragment or variant thereof, can be modified on the sugar of the ribonucleic acid. For example, the 2′ hydroxyl group (OH) can be modified or replaced with a number of different substituents. Exemplary substitutions at the 2′-position include, but are not limited to, H, halo, optionally substituted C1-6 alkyl; optionally substituted C1-6 alkoxy; optionally substituted C6-10 aryloxy; optionally substituted C3-8 cycloalkyl; optionally substituted C3-8 cycloalkoxy; optionally substituted C6-10 aryloxy; optionally substituted C6-10 aryl-C1-6 alkoxy, optionally substituted C1-12 (heterocyclyl)oxy; a sugar (e.g., ribose, pentose, or any described herein); a polyethyleneglycol (PEG), —O(CH2CH2O)nCH2CH2OR, where R is H or optionally substituted alkyl, and n is an integer from 0 to 20 (e.g., from 0 to 4, from 0 to 8, from 0 to 10, from 0 to 16, from 1 to 4, from 1 to 8, from 1 to 10, from 1 to 16, from 1 to 20, from 2 to 4, from 2 to 8, from 2 to 10, from 2 to 16, from 2 to 20, from 4 to 8, from 4 to 10, from 4 to 16, and from 4 to 20); “locked” nucleic acids (LNA) in which the 2′-hydroxyl is connected by a C1-6 alkylene or C1-6 heteroalkylene bridge to the 4′-carbon of the same ribose sugar, where exemplary bridges included methylene, propylene, ether, or amino bridges; aminoalkyl, as defined herein; aminoalkoxy, as defined herein; amino as defined herein; and amino acid, as defined herein

[0165] Generally, RNA includes the sugar group ribose, which is a 5-membered ring having an oxygen. Exemplary, non-limiting modified nucleotides include replacement of the oxygen in ribose (e.g., with S, Se, or alkylene, such as methylene or ethylene); addition of a double bond (e.g., to replace ribose with cyclopentenyl or cyclohexenyl); ring contraction of ribose (e.g., to form a 4-membered ring of cyclobutane or oxetane); ring expansion of ribose (e.g., to form a 6- or 7-membered ring having an additional carbon or heteroatom, such as for anhydrohexitol, altritol, mannitol, cyclohexanyl, cyclohexenyl, and morpholino that also has a phosphoramidate backbone); multicyclic forms (e.g., tricyclo; and “unlocked” forms, such as glycol nucleic acid (GNA) (e.g., R-GNA or S-GNA, where ribose is replaced by glycol units attached to phosphodiester bonds), threose nucleic acid (TNA, where ribose is replace with α-L-threofuranosyl-(3′→2′)), and peptide nucleic acid (PNA, where 2-amino-ethyl-glycine linkages replace the ribose and phosphodiester backbone). The sugar group can also contain one or more carbons that possess the opposite stereochemical configuration than that of the corresponding carbon in ribose. Thus, a polynucleotide molecule can include nucleotides containing, e.g., arabinose, as the sugar. Such sugar modifications are taught International Patent Publication Nos. WO2013052523 and WO2014093924, the contents of each of which are incorporated herein by reference in their entireties.

[0166] Combinations of Modifications: The mRNA polynucleotide encoding a Rep78 or Rep68 protein or a functional fragment or variant thereof can include a combination of modifications to the sugar, the nucleobase, and/or the internucleoside linkage. These combinations can include any one or more modifications described herein. Unless otherwise noted, the modified nucleotides can be completely substituted for the natural nucleotides of the polynucleotides of the invention. As a non-limiting example, the natural nucleotide uridine can be substituted with a modified nucleoside described herein. In another non-limiting example, the natural nucleotide uridine can be partially substituted (e.g., about 0.1%, about 1%, about 5%, about 10%, about 15%, about 20%, about 25%, about 30%, about 35%, about 40%, about 45%, about 50%, about 55%, about 60%, about 65%, about 70%, about 75%, about 80%, about 85%, about 90%, about 95% or about 99.9%) with at least one of the modified nucleoside disclosed herein. Any combination of base/sugar or linker can be incorporated into the polynucleotides of the invention and such modifications are taught in WO2013052523, WO2014093924, US20130115272 and US20150307542, the contents of each of which are incorporated herein by reference in its entirety.

[0167] In some aspect, an AAV-ITR based gene delivery system of the present disclosure or a component thereof, such as an AAV-ITR vector or Rep vector, is encapsulated in a liposome or lipid nanoparticle. In some aspects, the AAV-ITR vector is encapsulated in a first lipidic delivery system (e.g., a first liposome or LNP). In some aspects, the AAV-ITR vector is encapsulated in a first lipidic delivery system (e.g., a first liposome or LNP) optimized to deliver (transfect) a double stranded DNA into a target cell. In some aspects, the Rep vector is encapsulated in a second lipidic delivery system (e.g., a second liposome or LNP). In some aspects, the Rep vector is encapsulated in a second lipidic delivery system (e.g., a second liposome or LNP) optimized to deliver (transfect) an mRNA into a target cell. In some aspects, the first lipidic delivery system (e.g., a first liposome or LNP) containing an AAV-ITR vector and the second lipidic delivery system (e.g., a second liposome or LNP) containing a Rep vector have the same lipidic composition. In some aspects, the first lipidic delivery system (e.g., a first liposome or LNP) containing an AAV-ITR vector and the second lipidic delivery system (e.g., a second liposome or LNP) containing a Rep vector have different lipidic compositions.

[0168] In some aspects, the AAV-ITR vector and Rep vector are coencapsulated in a single lipidic delivery system (e.g., a single liposome or LNP). In some aspects, the AAV-ITR vector and the Rep vector are coencapsulated in a single polymeric delivery system.

[0169] In some aspects, the AAV-ITR vector in encapsulated in a liposome. In some aspects, the Rep vector is encapsulated in a liposome. In some aspects, both the AAV-ITR vector and Rep vector are encapsulated in liposomes. In some aspects, the AAV-ITR vector is encapsulated in a first liposome and the Rep vector is encapsulated in a second liposome. In some aspects, the first and second liposome have the same lipidic composition. In some aspects, the first and second liposome have different lipidic compositions.

[0170] In some aspects, the AAV-ITR vector in encapsulated in a LNP. In some aspects, the Rep vector is encapsulated in a LNP. In some aspects, both the AAV-ITR vector and Rep vector are encapsulated in LNPs. In some aspects, the AAV-ITR vector is encapsulated in a first LNP and the Rep vector is encapsulated in a second LNP. In some aspects, the first and second LNP have the same lipidic composition. In some aspects, the first and second LNP have different lipidic compositions.

[0171] In some aspects, the AAV-ITR vector is encapsulated in a liposome and the Rep vector is encapsulated in a LNP. In some aspects, the AAV-ITR vector is encapsulated in a LNP and the Rep vector is encapsulated in a liposome.

[0172] The lipidic delivery systems used to encapsulate and deliver (transfect) the AAV-ITR based gene delivery systems of the disclosure can be selected from commercially available systems and/or can be specially designed. For example, in some aspects, the AAV-ITR vector can be encapsulated in a LIPOFECTAMINE™ 2000 liposome. In some aspects, the Rep vector can be encapsulated in a LIPOFECTAMINE™ MESSENGERMAX™ liposome. In some aspects, the AAV-ITR vector can be encapsulated in a LIPOFECTAMINE™ 2000 liposome and the Rep vector can be encapsulated in a LIPOFECTAMINE™ MESSENGERMAX™ liposome.

[0173] Other commercially available lipidic delivery systems that can be used to encapsulate and deliver the AAV-ITR based gene delivery system of the present disclosure are, e.g., LIPOFECTAMINE™ 3000, LIPOFECTAMINE™ RNAiMAX, LIPOFECTINE™ LIPOFECTAMINE™ LTX, LIPOFECTAMINE™ Stem Transfection Reagent, LIPOFECTAMINE™ CRISPRMAX™ Cas9 Transfection Reagent, VIAFECT™ (cationic system optimized for transient expression), TRANSTAST™, INVIVOFECTAMINE™ 3.0, MIRUS BIO™ TRANSIT™-2020, GIBCO™ EXPIFECTAMINE™.

[0174] In some aspects, an AAV ITR-based gene delivery system of the present disclosure can be transfected into a target cell using electroporation. In some aspects, an AAV-ITR based gene delivery system of the present disclosure can be transfected into a target cell using a nonliposomal formulation such as FUGENE™ 6 or FUGENE™ I-ID. In some aspects, an AAV-ITR based gene delivery system of the present disclosure can be transfected into a target cell using a calcium phosphate-mediated system such as PROFECTION™. See, e.g., Chong et al. (2021) Peer J. 9:e11165; and Fus-Kujawa et al. (2021) Front. Bioeng. Biotechnol. 9:701031, which are herein incorporated by reference in their entireties.

[0175] In general, the AAV ITR-based gene delivery system of the present disclosure encompasses any delivery system or combination thereof that can deliver an AAV-ITR vector disclosed herein and a corresponding Rep vector disclosed herein to a specific cell or tissue.

[0176] In some aspects, the AAV ITR-based gene delivery system of the present disclosure can be targeted to a specific cell type (e.g., T cells, B cells or NK cells) or tissue (e.g., muscle) via a targeting molecule (e.g., an antibody) that specifically binds to specific surface proteins (e.g., one, two, three, or more) on the surface of a particular cell type (e.g., a T cell) or tissue (e.g., muscle tissue) thereby directing the AAV-ITR based gene delivery system of the present disclosure to the targeted cell type or tissue. In some aspects that targeting molecule, e.g., a MSTAR antibody, can be covalently attached to the surface of the lipidic delivery system (e.g., a liposome or LNP) or to a polymeric delivery system.

[0177] In some aspects, the lipidic delivery system comprises a LNP or liposome comprising a surface anchored targeting molecule (e.g., an antibody) that specifically binds to at least one cell- (e.g., a T cell, B cell or NK cell) or tissue- (e.g., muscle tissue) specific surface protein. In some aspects, the lipidic delivery system comprises an LNP comprising at least two surface anchored targeting molecules (e.g., two antibodies), wherein each cell- or tissue-specific targeting molecule specifically binds to at least one cell- or tissue-specific target protein (e.g., a first antibody targets a first target protein and a second antibody targets a second target protein). In some aspects, the lipidic delivery system comprises a set of LNPs comprising at least two LNPs, wherein the first LNP comprises a first cell- or tissue-specific targeting molecule (e.g., an antibody) that specifically binds to a first cell or tissue specific surface protein, and the second LNP comprises a second cell- or tissue-specific targeting molecule that specifically binds to a second cell- or tissue-specific specific surface protein.

[0178] The present disclosure provides a targeted delivery system comprising a LNP, liposome, or combination thereof comprising a surface anchored targeting molecule (e.g., antibody) or combination thereof that specifically binds to one or more specific surface proteins in a target cell (e.g., a T cell, B cell, muscle cell, fibroblast, etc.) or tissue (e.g., a specific organ, a tumor, or the microenvironment of a tumor) and efficiently delivers an AAV ITR-based gene delivery system of the present disclosure encapsulated in the LNP, liposome, or combination thereof to the target cell or tissue.

[0179] Any combination of cells within the hematopoietic lineage can be targeted by the targeted delivery systems of the present disclosure. In some aspects, target cells selected from bone marrow cells, hematopoietic stem cells (HSCs), hematopoietic stem and progenitor cells (HSPCs), peripheral blood mononuclear cells (PBMCs), myeloid progenitor cells, lymphoid progenitor cells, T-cells, B-cells, NKT cells, NK cells, dendritic cells, monocytes, granulocytes, erythrocytes, megakaryocytes, mast cells, basophils, eosinophils, neutrophils, macrophages, erythroid progenitor cells (e.g., HUDEP cells), megakaryocyte-erythroid progenitor cells (MEPs), common myeloid progenitor cells (CMPs), multipotent progenitor cells (MPPs), hematopoietic stem cells (HSCs), short term HSCs (ST-HSCs), IT-HSCs, long term HSCs (LT-HSCs), endothelial cells, neurons, astrocytes, pancreatic cells, pancreatic β-islet cells, liver cells, muscle cells, skeletal muscle cells, cardiac muscle cells, hepatic cells, fat cells, intestinal cells, cells of the colon, and cells of the stomach.

[0180] Non-limiting examples of various applications of the targeted AAV ITR-based gene delivery systems of the present disclosure (e.g., for targeting neurons, cells of the pancreas, hematopoietic stem cells and multipotent progenitors, etc.) are described next. For example, hematopoietic stem cells and multipotent progenitors can be targeted for gene editing (e.g., insertion) in vivo or ex vivo. As another example, pancreatic cells (e.g., β islet cells) can be targeted, e.g., to treat pancreatic cancer, to treat diabetes, etc. As another example, somatic cells in the brain such as neurons can be targeted (e.g., to treat indications such as Huntington's disease, Parkinson's, e.g., due to LRRK2 mutations, and ALS, e.g., due to SOD1 mutations). As another example, endothelial cells and cells of the hematopoietic system (e.g., megakaryocytes and/or any progenitor cell upstream of a megakaryocyte such as a megakaryocyte-erythroid progenitor cell (MEP), a common myeloid progenitor cell (CMP), a multipotent progenitor cell (MPP), a hematopoietic stem cells (HSC), a short term HSC (ST-HSC), an IT-HSC, a long term HSC (LT-HSC) can be targeted with a targeted AAV-based gene delivery system of the present disclosure to treat Von Willebrand's disease. For example, a cell (e.g., an endothelial cell, a megakaryocyte and/or any progenitor cell upstream of a megakaryocyte such as an MEP, a CMP, an MPP, an HSC such as an ST-HSC, an IT-HSC, and/or an LT-HSC) harboring a mutation in the gene encoding von Willebrand factor (VWF) can be targeted (in vitro, ex vivo, or in vivo) in order to introduce an active protein (e.g., via delivery of a functional VWF protein and/or a nucleic acid encoding a functional VWF protein) and/or in order to edit the mutated gene, e.g., by introducing a replacement sequence (e.g., via delivery of a gene editing tool and delivery of a DNA donor template). In some of the above cases (e.g., related to treating Von Willebrand's disease, related to targeting a cell harboring a mutation in the gene encoding VWF), a targeted AAV-based gene delivery system of the present disclosure provides for targeted binding to E-selectin.

[0181] As another example, a cell of a stem cell lineage (e.g., a stem and/or progenitor cell of the hematopoietic lineage, e.g., a GMP, MEP, CMP, MLP, MPP, and/or an HSC) can be targeted with a targeted AAV-based gene delivery system of the present disclosure to increase expression of stem cell factor (SCF) in the cell, which can therefore drive proliferation of the targeted cell. For example, a targeted AAV-based gene delivery system of the present disclosure can be used to deliver SCF and/or a nucleic acid (DNA or mRNA) encoding SCF to the targeted cell.

[0182] Methods and compositions of this disclosure can be used to treat any number of diseases, including any disease that is linked to a known causative mutation, e.g., a mutation in the genome. For example, methods and compositions of this disclosure can be used to treat sickle cell disease, β thalassemia, HIV, myelodysplasia syndromes, JAK2-mediated polycythemia vera, JAK2-mediated primary myelofibrosis, JAK2-mediated leukemia, and various hematological disorders. As additional non-limiting examples, the methods and compositions of this disclosure can also be used for B-cell antibody generation, immunotherapies (e.g., delivery of a checkpoint blocking reagent), and stem cell differentiation applications.

[0183] In some aspects, the AAV-ITR vector comprises a polynucleotide encoding a multispecific antibody such as a tetravalent/trispecific or a tetravalent/tetraspecific antibody that neutralizes a COVID-19 infective agent such as any known variant of a SARS CoV-2 virus. In some aspects, the antibody is a MSTAR antibody. In some aspects, the AAV-ITR vector can be administered to a COVID-19 patient in the form of a delivery system comprising a combination of the AAV-ITR and a Rep vector comprising a Rep68/78 mRNA, e.g., encapsulated in a lipidic delivery system disclosed herein (e.g., a LNP, a liposome, or a combination thereof), or in a polymeric delivery system, or in a combination thereof.

[0184] In some aspects, the AAV-ITR vector comprises a polynucleotide encoding a multispecific antibody directed against influenza or against HIV. In some aspects, the antibody can be a MSTAR antibody. In some aspects, the AAV-ITR vector can be administered to an HIV/AIDS patient in the form of a delivery system comprising a combination of the AAV-ITR and a Rep vector comprising a Rep68/78 mRNA, e.g., encapsulated in a lipidic delivery system disclosed herein (e.g., a LNP, a liposome, or a combination thereof), or in a polymeric delivery system, or in a combination thereof.

[0185] In some aspects, the AAV-ITR vector comprises a polynucleotide encoding a GLP-1 or GIP agonist or a glucagon agonist. In some aspects, the AAV-ITR vector can be administered to a type 1 diabetes patient in the form of a delivery system comprising a combination of the AAV-ITR and a Rep vector comprising a Rep68/78 mRNA, e.g., encapsulated in a lipidic delivery system disclosed herein (e.g., a LNP, a liposome, or a combination thereof), or in a polymeric delivery system, or in a combination thereof.

[0186] In some aspects, a lipidic delivery system (i.e., a LNP, liposome, or a combination thereof) comprising a surface anchored targeting molecule (e.g., an anti-CD3 antibody, such as an MSAT anti CD3 antibody) can deliver an AAV ITR-based gene delivery system of the present disclosure to a T-cell. In some aspect, the surface anchored T-cell targeting molecule (e.g., an antibody) specifically binds to at least two T-cell specific surface proteins (e.g., CD3 and CD28).

[0187] In addition to the AAV-ITR vector and Rep vector components of an AAV-ITR based gene delivery system of the present disclosure, there is a wide range of therapeutic payloads that can be co-encapsulated or attached (e.g., via cleavable linkers) to the lipidic delivery systems of the present disclosure (e.g., LNP, liposomes and combinations thereof) including for example, small molecules, proteins, nucleic acids, or diagnostic agents.

[0188] In some aspects, the polynucleotide encoding a therapeutic polypeptide, a therapeutic polynucleotide, or a combination thereof in the AAV-ITR component of an AAV ITR-based gene delivery system of disclosed herein can comprise a dsDNA encoding, e.g., an enzyme (e.g., for gene replacement therapy), a component of a gene editing system, (e.g., a Cas enzyme and/or a gRNA), a vaccine (e.g., a SARS-CoV2 vaccine such as mRNA-1273 or BNR162b2), a CAR, a TCR, a hormone, a growth factor, or an anti-inflammatory protein (e.g., a cytokine).

[0189] In some aspects, an AAV-ITR vector of the present disclosure comprises a genetic cassette encoding more than one therapeutic protein or polynucleotide. Thus, in some aspects, the AAV-ITR component of an AAV-ITR based gene delivery system of the present disclosure comprises a bicistronic construct, i.e., a polynucleotide comprising at least two cistrons. The presence of a genetic cassette encoding more than one gene of interest (e.g., two therapeutic proteins, two polypeptide subunits of a therapeutic protein such as an antibody, or components of a gene editing system such as a Cas nuclease and a gRNA) and further including elements such as at least one IRES or at least one 2A element allows co-expression from a single promoter.

[0190] As used herein, a “bicistronic” polynucleotide refer to a polynucleotide that upon transcription produces a single mRNA which comprises two coding sequences (i.e., cistrons) and encodes more than one product, e.g., two proteins. As used herein, a “polycistronic” polynucleotide refer to a polynucleotide that upon transcription produces a single mRNA which comprises more than two coding sequences (i.e., cistrons) and encodes more than two products, e.g., two proteins.

[0191] A bicistronic or polycistronic mRNA can comprise any element known in the art to allow for the translation of two or more genes from the same mRNA molecule including, but not limited to, an Internal Ribosome Entry Site (IRES) element, a T2A element, a P2A element, an E2A element, and an F2A element.

[0192] In some aspects, the AAV-ITR vector comprises two coding regions (e.g., protein coding regions) separated by an IRES element. In some aspects, the AAV-ITR vector comprises two coding regions (e.g., protein coding regions) separated by a 2A element. In some aspects, the AAV-ITR vector comprises three coding regions (e.g., protein coding regions) separated by IRES elements between each coding region. In some aspects, the AAV-ITR vector comprises three coding regions (e.g., protein coding regions) separated by a 2A element between each coding region.

[0193] In some aspects, the AAV-ITR vector comprises two protein-coding regions separated by IRES elements between each coding region, wherein the two proteins are polypeptide components of an antibody. In some aspects, the AAV-ITR vector comprises two protein coding regions) separated by a 2A element between each coding region, wherein the two proteins are polypeptide components of an antibody. In some aspects, the AAV-ITR vector comprises two protein-coding regions separated by IRES elements between each coding region, wherein the two proteins are polypeptide components of an MSTAR antibody. In some aspects, the AAV-ITR vector comprises two protein coding regions) separated by a 2A element between each coding region, wherein the two proteins are polypeptide components of an MSTAR antibody.

[0194] In some aspects, two cistrons are connected by a 2A element (e.g., a P2A element). In some aspects, two cistrons are connected by an IRES element. IRES elements are RNA regions that recruit the 40S ribosomal subunit through cap-independent mechanisms. IRES elements often adopt complex RNA structures, which serve as the anchoring site for the ribosome guided by RNA-RNA and/or RNA-protein interactions. 2A self-cleaving peptides, or 2A peptides, are a class of 18-22 aa-long peptides, which can induce ribosomal skipping during translation of a protein in a cell. 2A elements are good candidates to replace IRES because of its small size and high cleavage efficiency between genes upstream and downstream of the 2A peptide. In some aspects, the 2A element is a P2A element (porcine teschovirus-1 2A). In other aspects, the 2A element is a F2A element (foot-and-mouth disease virus), E2A element (equine rhinitis A virus), or T2A element (thosea asigna virus 2A). In some aspects, the 2A element portion of a bicistronic polynucleotide comprises 2 or more 2A elements in tandem, wherein the 2A elements are selected from P2A, E2A, F2A, E2A, and T2A. In some aspects, the 2A element is P2A-T2A. In some aspects, the 2A element is 2A-T2A-E2A.

[0195] The AAV-ITR based gene delivery system of the present disclosure can be targeted to any cell, tissue, or cellular compartment as long as the appropriate targeting molecule or set thereof specifically binds to one or more target molecules (e.g., receptors) on the target cell, tissue, or cellular compartment. In some aspects, an AAV-ITR based gene delivery system of the present disclosure can be targeted to a human cell, e.g., a T cell. In some aspects, an AAV-ITR based gene delivery system of the present disclosure can be targeted to an organ, e.g., liver. In some aspects, an AAV-ITR based gene delivery system of the present disclosure can be targeted to a tissue, e.g., muscle tissue. In some aspects, an AAV-ITR based gene delivery system of the present disclosure can be targeted to a tumor.

[0196] In some aspects, the present disclosure provides an AAV-ITR based gene delivery system for targeted delivery comprising a single population of liposomes or LNP with targeting molecules (e.g., monospecific or bispecific antibodies) conjugated to their surface, wherein the single population of liposomes or LNP contains the AAV-ITR vector and Rep vector. In some aspects, the present disclosure an AAV-ITR based gene delivery system for targeted delivery comprising two populations of liposomes or LNP with targeting molecules (e.g., monospecific or bispecific antibodies) conjugated to their surfaces, wherein a first population of liposomes or LNP contains the AAV-ITR vector and a second population of liposomes or LNP contains the Rep vector.

[0197] In some aspects, the present disclosure an AAV-ITR based gene delivery system for targeted delivery comprising a single population of LNP with targeting molecules (e.g., monospecific or bispecific antibodies) conjugated to their surface, wherein the single population of LNP contains the AAV-ITR vector and Rep vector. In some aspects, the present disclosure an AAV-ITR based gene delivery system for targeted delivery comprising a single population of liposomes with targeting molecules (e.g., monospecific or bispecific antibodies) conjugated to their surface, wherein the single population of liposomes contains the AAV-ITR vector and Rep vector.

[0198] In some aspects, the disclosure provides an AAV-ITR based gene delivery system for targeted delivery comprising two populations of liposomes with targeting molecules (e.g., monospecific or bispecific antibodies) conjugated to their surfaces, wherein a first population of liposomes contains the AAV-ITR vector and a second population contains the Rep vector.

[0199] In some aspects, the present disclosure provides an AAV-ITR based gene delivery system for targeted delivery comprising two populations of LNP with targeting molecules (e.g., monospecific or bispecific antibodies) conjugated to their surfaces, wherein a first population of LNP contains the AAV-ITR vector and a second population of LNP contains the Rep vector.

[0200] In some aspects, the present disclosure provides an AAV-ITR based gene delivery system for targeted delivery comprising a population of liposomes with targeting molecules (e.g., monospecific or bispecific antibodies) conjugated to their surfaces which contains the AAV-ITR vector, and a population of LNP with targeting molecules (e.g., monospecific or bispecific antibodies) conjugated to their surfaces which contains the Rep vector.

[0201] In some aspects, the present disclosure provides an AAV-ITR based gene delivery system for targeted delivery comprising a population of LNP with targeting molecules (e.g., monospecific or bispecific antibodies) conjugated to their surfaces which contains the AAV-ITR vector, and a population of liposomes with targeting molecules (e.g., monospecific or bispecific antibodies) conjugated to their surfaces which contains the Rep vector.

[0202] In some aspects, targeting of a liposome, LNP, or other non-lipidic delivery system, e.g., a polymeric delivery system, comprising an AAV-ITR based gene delivery system of the present disclosure to a specific cell type (e.g., a T cell) or tissue (e.g., muscle) can be achieved, e.g., by a Fab fragment or an MSTAR antibody. In some aspects, the MSTAR antibody comprises a single chain CHCL. In some aspects, the MSTAR antibody does not comprise a single chain CHCL. In some aspects, the MSTAR antibody is monospecific. In some aspects, the MSTAR antibody is bispecific. In some aspects, the MSTAR antibody is trispecific. In some aspects, the MSTAR antibody is multispecific.

[0203] The lipidic delivery systems disclosed herein a not limited to liposomes or LNPs. In some aspects, the lipidic delivery system is a nanocarrier other than a LNP, e.g., a micelle. Micelles are colloidal dispersions with a particle size between 5-100 nm. In some aspects, the nanocarrier is an extracellular vesicle (EV). In some aspects, the extracellular vesicle is an exosome (size between 30-200 nm) or a microvesicle (size between 100-1000 nm).

[0204] In some aspects, the amount of Rep vector in an AAV-ITR based gene delivery system of the present disclosure is about 30%, about 10%, about 3.5%, about 1.5%, or about 0.5% of the amount of AAV-ITR vector. In some aspects, AAV-ITR vector and Rep vector are present in an AAV-ITR based gene delivery system of the present disclosure at an about 100:30 ratio, about 100:10 ratio, about 100:3.5 ratio, about 100:1.5 ratio, or about 100:0.5 ratio.

[0205] In some aspects, the amount of Rep vector in an AAV-ITR based gene delivery system of the present disclosure is about 40%, about 39%, about 38%, about 37%, about 36%, about 35%, about 34%, about 33%, about 32%, about 31%, about 30%, about 29%, about 28%, about 27%, about 26%, about 25%, about 24%, about 23%, about 22%, about 21%, about 20%, about 19%, about 18%, about 17%, about 16%, about 15%, about 14%, about 13%, about 12%, about 11%, about 10%, about 9%, about 8%, about 7%, about 6%, about 5%, about 4.5%, about 4%, about 3.5%, about 3%, about 2.5%, about 2%, about 1.5%, about 1%, about 0.5%, about 0.4%, about 0.3%, about 0.2% or about 0.1% of the amount of AAV-ITR vector.

[0206] In some aspects, the amount of Rep vector in an AAV-ITR based gene delivery system of the present disclosure is less than about 40%, less than about 39%, less than about 38%, less than about 37%, less than about 36%, less than about 35%, less than about 34%, less than about 33%, less than about 32%, less than about 31%, less than about 30%, less than about 29%, less than about 28%, less than about 27%, less than about 26%, less than about 25%, less than about 24%, less than about 23%, less than about 22%, less than about 21%, less than about 20%, less than about 19%, less than about 18%, less than about 17%, less than about 16%, less than about 15%, less than about 14%, less than about 13%, less than about 12%, less than about 11%, less than about %, less than about 9%, less than about 8%, less than about 7%, less than about 6%, less than about 5%, less than about 4.5%, less than about 4%, less than about 3.5%, less than about 0.5%, less than about 2.5, less than about 2%, less than about 1.5%, less than about 1%, less than about 0.5%, less than about 0.4%, less than about 0.3%, less than about 0.2% or less than about 0.1% of the amount of AAV-ITR vector.

[0207] In some aspects, the amount of Rep vector in an AAV-ITR based gene delivery system of the present disclosure is between about 40% and about 35%, between about 35% and about 30%, between about 30% and about 25%, between about 25% and about 20%, between about 20% and about 15%, between about 15% and about 10%, between about 10% and about 5%, between about 5% and about 0.1%, between about 10% and about 8%, between about 9% and about 7%, between about 8% and about 6%, between about 7% and about 5%, between about 6% and about 4%, between about 5% and about 3%, between about 4% and about 2%, between about 3% and about 1%, between about 2% and about 0.1%, between about 5% and about 4%, between about 4% and about 3%, between about 3% and about 2%, between about 2% and about 1%, between about 1% and about 0.1%, between about 5% and about 4.5%, between about 4.5% and about 4%, between about 4% and about 3.5%, between about 3.5% and about 3%, between about 3% and about 2.5%, between about 2.5% and about 2%, between about 2% and about 1.5%, between about 1.5% and about 1%, between about 1% and about 0.5%, between about 0.5% and about 0.1%, between about 1% and about 0.9%, between about 0.9% and about 0.8%, between about 0.8% and about 0.7%, between about 0.7% and about 0.6%, between about 0.6% and about 0.5%, between about 0.5% and about 0.4%, between about 0.4% and about 0.3%, between about 0.3% and about 0.2%, or between about 0.2% and about 0.1% of the amount of AAV-ITR vector.

[0208] The disclosure provides methods of treatment achieving sustained gene expression by transfecting target cells with a linear dsDNA vector comprising a polynucleotide encoding a therapeutic polypeptide, polynucleotide, or combination thereof flanked by parvoviral ITR (AAV-ITR vector), wherein the dsDNA vector is co-transfected with a mRNA vector encoding a parvoviral Rep78 or Rep68 protein which is transiently co-expressed in the target cell (Rep vector).

[0209] The methods of the present disclosure comprise the administration of a combination of vectors, an AAV-ITR vector (e.g., a linear dsDNA vector encoding a therapeutic polypeptide, polynucleotide, or combination thereof) and a Rep vector, wherein the Rep vector (e.g., a Rep78 vector) is in a sufficient molar amount (ratio) relative to the amount of AAV-ITR vector to induce the transient expression of Rep protein (e.g., Rep78) encoded by the Rep vector. The linear parvovirus ITR-DNA vector is thus temporarily amplified which results in persistent gene expression of the therapeutic polypeptide, polynucleotide, or combination thereof encoded by the AAV-ITR vector through episomal maintenance and/or thorough chromosomal integration. The Rep protein (e.g., Rep78), introduced transiently, increases the frequency of linear AAV-ITR DNA integration in dividing cells.

[0210] The AAV-ITR based gene delivery systems of the present disclosure result in an increased copy number of the AAV-ITR vector transduced into cells, which enhances the integration frequency of the AAV-ITR DNA into host cell genome, e.g., at AAVS1, resulting in higher percentages of persistent transgene expressing cell populations. In vivo, this results in long-term, high-level gene expression, providing therapeutic opportunities to treat various conditions and/or diseases including infectious diseases, cancers, autoimmune diseases, and genetic diseases. Furthermore, the co-administration (co-transfection) of a Rep vector comprising a Rep78 or Rep68 mRNA together with the AAV-ITR vector comprising a polynucleotide encoding a gene on interest results in a short-time (transient) expression of the Rep78 or Rep68 protein that can avoid generating an immune response by the host which can result in the elimination of transgene expressing cells. Therefore, increased AAV-ITR copy number and increased AAV-ITR genomic integration in transduced cells and avoidance of immune-mediated cell elimination, together support sustained therapeutic transgene protein expression. This allows the AAV-ITR based gene delivery systems of the present disclosure to be used to treat, e.g., systemic infections wherein the infectious agent such as a virus (e.g., SARS-CoV2, HIV, influenza, etc.) infects multiple cell types and organs. Furthermore, this also allows that methods, nucleic acids, compositions and delivery systems described herein can be used to target specific cell types, such as T cells, B cells, liver cells, lung cells, and different cancer cells to treat localized diseases, infections or other conditions.

[0211] The present disclosure provides diagnostic methods and methods of treatment comprising the use the AAV-ITR based gene delivery systems of the present disclosure, which can be encapsulated as disclosed about and elsewhere is this disclosure, e.g., in lipidic delivery systems (e.g., liposomes, lipid nanoparticles, micelles, or combination thereof), polymeric delivery systems, extracellular vesicles, exosomes (e.g., natural, synthetic, semisynthetic, engineered, nanovesicles, hybrid exosomes, or exosome-mimetics, e.g., biomimetic exosomes).

[0212] The present disclosure provides a method of delivering a therapeutic polypeptide, polynucleotide, or a combination thereof in vivo or ex vivo to a subject in need of treatment of a disease or condition, wherein the method comprises delivering an AAV-ITR based gene delivery system of the present disclosure to the subject. In some aspects, the method comprises delivering an AAV-ITR disclosed herein and a Rep vector disclosed herein. In some aspects, the AAV-ITR vector comprises a polynucleotide encoding a therapeutic polypeptide, polynucleotide, or a combination thereof, e.g., in a monocistronic, bicistronic, or multicistronic construct. In some aspects, the method comprises co-delivery a Rep vector disclosed herein with the AAV-ITR vector, wherein the Rep vector comprises an mRNA encoding an AAV Rep78 or Rep78 protein. In some aspects, transfection of a patient's cell or tissue with the Rep vector results in transient expression of the Rep protein, wherein the Rep protein causes the replication and amplification of the polynucleotide encoding the therapeutic polypeptide, polynucleotide, or combination thereof and expression of the therapeutic polypeptide to treat a disease or condition in the subject. In some aspects, the AAV-ITR vector is a dsDNA. In some aspects, the AAV-ITR vector and the Rep vector can be in separate delivery vehicles, e.g., a lipidic delivery system comprising a liposome and/or a lipid nanoparticle, a polymeric delivery system, or a combination thereof. In some aspects, the AAV-ITR vector is in a first liposome and the Rep vector is in a second liposome. In some aspects, the compositions of the first and second liposome are different. In some aspects, the compositions of the first and second liposome are the same. In some aspects, the AAV-ITR vector is in a first LNP and the Rep vector is in a second LNP. In some aspects, the compositions of the first and second LNP are different. In some aspects, the compositions of the first and second LNP are the same. In some aspects, the AAV-ITR vector is in a liposome and the Rep vector is in an LNP. In some aspects, the AAV-ITR vector is in an LNP and the Rep vector is in a liposome. In some aspects, the AAV-ITR vector and the Rep vector are in one delivery vehicle, i.e., in the same lipidic delivery system (e.g., a liposome, LNP, micelle, extracellular vesicle, emulsion, or exosome) o polymeric delivery system (e.g., a dendrimer).

[0213] In some aspects, the target cell contains at least one component selected from the group consisting of DNA polymerase δ (DNA Pol δ), Replication Factor C (RFC), Proliferating Cell Nuclear Antigen (PCNA), and minichromosome maintenance protein complex (MCM complex). See, e.g., Nash et al. (2007) J. Virol. 81: 5777-5787. DNA Pol δ is an enzyme complex found in eukaryotes that is involved in DNA replication and repair. The DNA Pol δ complex consists of 4 subunits: POLD1, POLD2, POLD3, and POLD4. DNA Pol δ is an enzyme used for both leading and lagging strand synthesis. It exhibits increased processivity when interacting with the proliferating cell nuclear antigen (PCNA). As well, the multisubunit protein Replication Factor C, through its role as the clamp loader for PCNA (which involves catalyzing the loading of PCNA on to DNA) is important for DNA Pol δ function. Replication Factor C is a five-subunit protein complex that is required for DNA replication. RFC is used in eukaryotic replication as a clamp loader, similar to the γ Complex in Escherichia coli. Its role as a clamp loader involves catalyzing the loading of PCNA onto DNA. It binds to the 3′ end of the DNA and uses ATP to open the ring of PCNA so that it can encircle the DNA. ATP hydrolysis causes the release of RFC, with concomitant clamp loading onto DNA. For DNA polymerase, RFC serves as primer identification. PCNA is a DNA clamp that acts as a processivity factor for DNA polymerase δ in eukaryotic cells and is essential for replication. PCNA is a homotrimer and achieves its processivity by encircling the DNA, where it acts as a scaffold to recruit proteins involved in DNA replication, DNA repair, chromatin remodeling and epigenetics. Many proteins interact with PCNA via the two known PCNA-interacting motifs PCNA-interacting peptide (PIP) box and AlkB homologue 2 PCNA interacting motif (APIM). Proteins binding to PCNA via the PIP-box are mainly involved in DNA replication whereas proteins binding to PCNA via APIM are mainly important in the context of genotoxic stress. The minichromosome maintenance protein complex (MCM complex) is a DNA helicase essential for genomic DNA replication. Eukaryotic MCM consists of six gene products, MCM2 to MCM7, which form a heterohexamer. As a critical protein for cell division, MCM is also the target of various checkpoint pathways, such as the S-phase entry and S-phase arrest checkpoints. Both the loading and activation of MCM helicase are strictly regulated and are coupled to cell growth cycles. The MCM2-7 heterohexamer is required for both DNA replication initiation and elongation; its regulation at each stage is a central feature of eukaryotic DNA replication.

[0214] In some aspects, the present disclosure provides a therapeutic polypeptide, polynucleotide, or combination thereof produced in vivo or ex vivo according to the methods disclosed herein and using the AAV-ITR based gene delivery system disclosed herein, which comprises a combination of AAV-ITR and Rep vectors. The present disclosure provides a set of vectors comprising an AAV-ITR vector disclosed herein and a Rep vector disclosed herein. In some aspects, the vectors are encapsulated in a lipidic or polymeric delivery system or a combination thereof.

[0215] The cellular targets for specific delivery of the combination of (i) an AAV-ITR vector comprising a polynucleotide encoding a therapeutic polypeptide, polynucleotide, or combination thereof and (ii) a Rep vector comprising the Rep78 or Rep68 mRNA include any cell type depending upon the therapeutic polypeptide, polynucleotide, or combination thereof encoded by the AAV-ITR vector and the particular disease or condition to be treated.

[0216] In theory and in practice, essentially any biological moiety such as a therapeutic polypeptide can be delivered to a patient in need of treatment thereof. The diseases or conditions that can be treated using the compositions and methods of the present disclosure are essentially any disease or infection, but infectious diseases and/or oncological conditions or diseases are particularly well suited for treatment using an AAV-base gene delivery system of the present disclosure. In order to achieve effective delivery to such patients, and depending upon the target cell or organ, a suitable delivery or packaging system (e.g., a lipidic delivery system, a polymeric delivery system, or a combination thereof) must be selected.

[0217] In some aspects, a therapeutic polypeptide, polynucleotide, or combination thereof disclosed in detail below (e.g., antibodies, CARs, components of a gene editing systems, peptides or enzymes for replacement therapy, among others) are produced in vivo in a patient in need of treatment thereof by administration of the combination of an AAV-ITR vector having a polynucleotide encoding the therapeutic polypeptide, polynucleotide, or combination thereof and a Rep vector, e.g., a Rep 78 vector of SEQ ID NO:38.

[0218] In some aspects, the AAV-ITR comprises a polynucleotide sequence presented in the table below.

TABLE 3
Exemplary AAV-ITR vectors.

| | | | | Nucleic |
|---|---|---|---|---|
| | | | Protein | acid |
| Gene or plasmid | MX | | SEQ ID | SEQ ID |
| background | Code | Molecule Designation | NO | NO |
| Bispecific CD19 × CD20 | MX1954 | STAR_ahCD19_hB43xahCD20_ofa_{—} | 40 | 41 |
| CAR | | CD8BBZ | | |
| Bispecific CD19 × CD20 | MX1955 | STAR_ahCD19_hB43xahCD20_ofa_{—} | 42 | 43 |
| CAR | | CD4TM_BBZ | | |
| Bispecific CD19 × CD20 | MX1956 | STAR_ahCD19_hB43xahCD20_ofa(altL1)_{—} | 44 | 45 |
| CAR | | CD8TM_BBZ | | |
| Bispecific CD19 × CD20 | MX1957 | STAR_ahCD19_hB43xahCD20_ofa(altL2)_{—} | 46 | 47 |
| CAR | | CD8TM_BBZ | | |
| hEPO gene in AAV2 | MX1959 | hEPO | 48 | 49 |
| ITR-hEPO vector | | | | |
| mCherry gene in AAV2 | MX1960 | mCherry | 50 | 51 |
| ITR-mCherry vector | | | | |
| mEPO gene in AAV2 | MX1961 | mEPO | 52 | 53 |
| ITR-mEPO vector | | | | |
| Luciferase gene in AAV2 | | Luciferase | 54 | 55 |
| ITR-Luc vector | | | | |
| Anti-COVID | MX1448 | Anti-COVID E12 × E8 | 56 | 57 |
| E12 × E8 bispecific Ab in | | bispecific Ab | | |
| AAV2 ITR vector | | | | |

[0219] In some aspects, the AAV-ITR vector comprises a polynucleotide sequence set forth the table above. In some aspects, the AAV-ITR vector is the MX1954 bispecific CD19xCD20 CAR AAV-ITR vector presented in the table above. In some aspects, the AAV-ITR vector is the MX1955 bispecific CD19xCD20 CAR AVV-ITR vector presented in the table above. In some aspects, the AAV-ITR vector is the MX1956 bispecific CD19xCD20 CAR AVV-ITR vector presented in the table above. In some aspects, the AAV-ITR vector is the MX1957 bispecific CD19xCD20 CAR AVV-ITR vector presented in the table above. In some aspects, the AAV-ITR vector is the MX1959 hEPO gene in AAV2 ITR-hEPO AVV-ITR vector presented in the table above. In some aspects, the AAV-ITR vector is the MX1960 mCherry gene in AAV2 ITR-mCherry AVV-ITR vector presented in the table above. In some aspects, the AAV-ITR vector is the MX1961 mEPO gene in AAV2 ITR-mEPO AVV-ITR vector presented in the table above. In some aspects, the AAV-ITR vector is Luciferase gene in AAV2 ITR-Luc AVV-ITR vector presented in the table above. In some aspects, the AAV-ITR vector is the MX1448 Anti-COVID E12xE8 bispecific Ab in AAV2 ITR vector presented in the table above.

[0220] In some aspects, the AAV-ITR vector is derived from the MX1954 bispecific CD19xCD20 CAR AAV-ITR vector presented in the table above, wherein the subsequence (CDS) encoding the corresponding protein sequence presented in the table above has been replaced with a polynucleotide encoding a therapeutic polypeptide, polynucleotide, or combination thereof. In some aspects, the AAV-ITR vector is derived from the MX1955 bispecific CD19xCD20 CAR AVV-ITR vector presented in the table above, wherein the subsequence (CDS) encoding the corresponding protein sequence presented in the table above has been replaced with a polynucleotide encoding a therapeutic polypeptide, polynucleotide, or combination thereof. In some aspects, the AAV-ITR vector is derived from the MX1956 bispecific CD19xCD20 CAR AVV-ITR vector presented in the table above, wherein the subsequence (CDS) encoding the corresponding protein sequence presented in the table above has been replaced with a polynucleotide encoding a therapeutic polypeptide, polynucleotide, or combination thereof. In some aspects, the AAV-ITR vector is derived from the MX1957 bispecific CD19xCD20 CAR AVV-ITR vector presented in the table above, wherein the subsequence (CDS) encoding the corresponding protein sequence presented in the table above has been replaced with a polynucleotide encoding a therapeutic polypeptide, polynucleotide, or combination thereof. In some aspects, the AAV-ITR vector is derived from the MX1959 hEPO gene in AAV2 ITR-hEPO AVV-ITR vector presented in the table above, wherein the subsequence (CDS) encoding the corresponding protein sequence presented in the table above has been replaced with a polynucleotide encoding a therapeutic polypeptide, polynucleotide, or combination thereof. In some aspects, the AAV-ITR vector is derived from the MX1960 mCherry gene in AAV2 ITR-mCherry AVV-ITR vector presented in the table above, wherein the subsequence (CDS) encoding the corresponding protein sequence presented in the table above has been replaced with a polynucleotide encoding a therapeutic polypeptide, polynucleotide, or combination thereof. In some aspects, the AAV-ITR vector is derived from the MX1961 mEPO gene in AAV2 ITR-mEPO AVV-ITR vector presented in the table above, wherein the subsequence (CDS) encoding the corresponding protein sequence presented in the table above has been replaced with a polynucleotide encoding a therapeutic polypeptide, polynucleotide, or combination thereof. In some aspects, the AAV-ITR vector is derived from the Luciferase gene in AAV2 ITR-Luc AVV-ITR vector presented in the table above, wherein the subsequence (CDS) encoding the corresponding protein sequence presented in the table above has been replaced with a polynucleotide encoding a therapeutic polypeptide, polynucleotide, or combination thereof. In some aspects, the AAV-ITR vector is derived from the MX1448 Anti-COVID E12xE8 bispecific Ab in AAV2 ITR vector presented in the table above, wherein the subsequence (CDS) encoding the corresponding protein sequence presented in the table above has been replaced with a polynucleotide encoding a therapeutic polypeptide, polynucleotide, or combination thereof.

[0221] In some aspects, the present disclosure provides the use of an AAV-ITR based gene delivery system (e.g., an AAV-ITR vector disclosed herein in combination with a Rep78 vector or Rep68 vector disclosed herein) as a medicament. In some aspects, the present disclosure provides the use of an AAV-ITR based gene delivery system (e.g., a combination of an AAV-ITR vector disclosed herein in combination with a Rep78 vector or Rep68 vector disclosed herein) for the treatment of a disease or conditions selected, e.g., from the group consisting of cancer, an infectious disease, or a genetic disease. In some aspects, the present disclosure provides the use of an AAV-ITR based gene delivery system (e.g., an AAV-ITR vector disclosed herein in combination with a Rep78 vector or Rep68 vector disclosed herein) in the manufacture of a medicament to treat a subject in need of treatment thereof.

[0222] In a specific aspect, the combination comprises an AAV-ITR vector of SEQ ID NO:35 in which the ORF has been replaced with polynucleotide encoding a therapeutic polypeptide, polynucleotide, or combination thereof, and a Rep78 vector having SEQ ID NO:38.

[0223] In some aspects, both vectors are co-encapsulated in a single lipidic or polymeric delivery system disclosed herein. In some aspects, each vector is encapsulated in lipidic or polymeric delivery system disclosed herein. For example, in some aspects, the AAV-ITR vector in encapsulated in a first LNP, and the Rep78 vector is encapsulated in a second LNP.

[0224] In some aspects, the present disclosure provides a method of delivering a therapeutic polypeptide, polynucleotide, or combination thereof in vivo comprising administering an AAV-ITR based gene delivery system of the present disclosure comprising an AAV-ITR vector disclosed herein and an Rep78 vector disclosed herein in a weight ratio (ngs/ngs) of AAV-ITR vector to Rep78 vector of about 1:1 to a patient in need of treatment thereof.

[0225] The present disclosure provides a method of treating a disease or condition in a subject in need of treatment comprising administering an AAV-ITR based gene delivery system of the present disclosure to the subject. The present disclosure provides a method of treating a disease or condition comprising co-administering an AAV-ITR vector of the present disclosure and a Rep vector of the present disclosure to a subject in need thereof. In some aspects, the disease or condition is selected, e.g., from the group consisting of cancer, an immune disease, an inflammatory disease, a neurodegenerative disorder, a central nervous disease, a metabolic disease, an autoimmune disease, an infectious disease, or a fibrotic disease. Diseases and conditions that can be treated using the compositions and methods disclosed herein are discussed in detail below.

[0226] The disclosure provides a cell comprising an AAV-ITR based gene delivery system of the present disclosure, i.e., an AAV-ITR vector and a Rep vector. In some aspects, the AAV-ITR vector is integrated in the cell's genome. Also provided is a cell genetically modified by using an AAV-ITR based gene delivery system of the present disclosure. E.g., the cell can be a cell in which a defective gene has been replaced by a healthy version of the gene delivered via the AAV-ITR vector of an AAV-ITR based gene delivery system of the present disclosure. E.g., the cell can be a cell in which a polynucleotide or polynucleotides encoding an antibody has been inserted in the genome of the cell by using an AAV-ITR based gene delivery system of the present disclosure. In some aspects, the cell can be a cell in which a polynucleotide encoding CAR has been inserted in the genome of the cell by using an AAV-ITR based gene delivery system of the disclosure.

[0227] The present disclosure also provides a pharmaceutical composition comprising an AAV-ITR based delivery system of the present disclosure and a pharmaceutically acceptable excipient. The present disclosure provides a pharmaceutical composition comprising an AAV-ITR vector of the present disclosure and a pharmaceutically acceptable excipient. The present disclosure provides a pharmaceutical composition comprising a Rep vector of the present disclosure and a pharmaceutically acceptable excipient. The present disclosure provides a pharmaceutical composition comprising an AAV-ITR vector of the present disclosure and a Rep vector of the present disclosure and a pharmaceutically acceptable excipient. The present disclosure also provides a pharmaceutical composition comprising a cell disclosed above.

[0228] In some aspects, the administration of the AAV-ITR based gene delivery system of the present disclosure, a cell disclosed herein, or a pharmaceutical composition disclosed herein is, for example, parenteral, intramuscular, intrapulmonary, intranasal, intravenous, intraarterial, intraperitoneal, subcutaneous, intraocular, intrathecal, intratumoral, or peritumoral. In some specific aspects, the AAV-ITR vector and Rep vector of the present disclosure are co-administered intramuscularly, e.g., via intramuscular injection, to a subject in need thereof. In some aspects, the AAV-ITR based gene delivery system of the present disclosure or cells (autologous or nonautologous) modified using the AAV-ITR based gene delivery system of the present disclosure can be administered to a subject in need thereof. In some aspects, the AAV-ITR based gene delivery system of the present disclosure or cells (autologous or heterologous) modified using the AAV-ITR based gene delivery system of the present disclosure can be administered to a subject in need thereof using an implantable device. See, e.g., Chang (1997) IEEE Eng. Med. Biol. Mag. 16:145-150. In some aspects, an AAV-ITR based gene delivery system of the present disclosure can be used to genetically modify a patient's cells for autologous CAR T-cell therapy. In some aspects, an AAV-ITR based gene delivery system of the present disclosure can be used to genetically modify T cells for allogeneic CAR T-cell therapy.

[0229] In some aspects, the present disclosure provides a method of sustained polypeptide expression in a host cell comprising transfecting the host cell with an AAV-ITR based delivery system of the present disclosure (i.e., a combination comprising an AAV-ITR vector and a Rep vector) without inducing a vector associated immune response.

[0230] The present disclosure provides compositions and methods as disclosed above wherein the therapeutic polypeptide encoded by a polynucleotide or polynucleotides in the AAV-ITR vector is selected from the group consisting of SARS-CoV2 (COVID) neutralizing antibodies, influenza neutralizing antibodies, HIV neutralizing antibodies, gastric inhibitory polypeptide (GIP) agonists, glucagon-like peptide-1 (GLP-1) agonists, CAR, anticancer antibodies, cytokines, enzymes, or ionic channels. The present disclosure provides compositions and methods as disclosed above wherein the therapeutic polynucleotide in the AAV-ITR vector is a functional gene to treat a disease caused by the present of a defective non-functional gene in a patient in need thereof. In a specific aspect, this disclosure provides compositions and methods as disclosed above wherein the therapeutic polynucleotide in the AAV-vector encodes human erythropoietin (EPO).

[0231] The present disclosure provides compositions and methods as disclosed above wherein the therapeutic polynucleotide in the AAV-ITR vector encodes components of a gene editing system to treat a genetic disease caused by a defective gene, thereby correcting the genetic defect in the subject. In some aspects, the therapeutic polynucleotide in the AAV-ITR vector encodes a gene editing nuclease (e.g., Cas) and a gRNA capable of correcting an error in a defective gene in a patient in need thereof. In some aspects, the therapeutic polynucleotide in the AAV-ITR vector encodes a gene editing nuclease (e.g., Cas) and a gRNA capable of correcting an error in a defective gene in a patient having a triplet repeat disease. Triplet repeat diseases (TRDs) are caused by pathogenic expansions of trinucleotide sequence repeats within coding and non-coding regions of different genes. They are typically progressive, very disabling and frequently involve the nervous system. In some aspects, the triplet repeat disease is selected from the group consisting of Huntington's disease, Spinocerebellar ataxia type 1 (SCA1), SCA2, SCA3, SCA6, SCA7, SCA8, SCA12, SCA17, spinal and bulbar muscular atrophy, dentatorubropallidoluysian atrophy, myotonic dystrophy type 1, oculopharingeal muscular dystrophy, Friedreich's ataxia, fragile X syndrome, fragile X-associated tremor/ataxia syndrome, fragile XE mental retardation, Huntington's disease-like 2, and Fuchs corneal dystrophy.

[0232] In some aspects, the present disclosure provides an AAV-ITR based delivery system comprising (i) an AAV-ITR vector comprising a polynucleotide encoding a CRISPR/Cas gene editing system and (ii) a Rep78 vector, wherein the CRISPR/Cas gene editing system comprises a polynucleotide encoding a Cas9 nuclease and a polynucleotide encoding a gRNA.

[0233] In some aspects, the present disclosure provides an AAV-ITR based delivery system comprising (i) an AAV-ITR vector comprising a polynucleotide encoding an antibody, e.g., an MSTAR antibody, and (ii) a Rep78 vector, wherein the polynucleotide encoding the antibody is bicistronic. In some aspects, one cistron encodes an antibody heavy chain and another cistron encodes an antibody light chain.

[0234] In some aspects, the present disclosure provides an AAV-ITR based delivery system comprising (i) an AAV-ITR vector comprising a polynucleotide encoding an anti-cMet/Trop2 bispecific antibody, and (ii) a Rep78 vector. In some aspects, the present disclosure provides an AAV-ITR based delivery system comprising (i) an AAV-ITR vector comprising a polynucleotide encoding an anti-COVID-19 bispecific antibody and (ii) a Rep78 vector. In some aspects, the present disclosure provides an AAV-ITR based delivery system comprising (i) an AAV-ITR vector comprising a polynucleotide encoding a CAR and (ii) a Rep78 vector. In some aspects, the present disclosure provides an AAV-ITR based delivery system comprising (i) an AAV-ITR vector comprising a polynucleotide encoding GLP-1 and/or a GLP-1 agonist and (ii) a Rep78 vector. In some aspects, the present disclosure provides an AAV-ITR based delivery system comprising (i) an AAV-ITR vector comprising a polynucleotide encoding a COVID neutralizing antibody and (ii) a Rep78 vector. In some aspects, the present disclosure provides an AAV-ITR based delivery system comprising (i) an AAV-ITR vector comprising a polynucleotide encoding an HIV neutralizing antibody and (ii) a Rep78 vector. In some aspects, the present disclosure provides an AAV-ITR based delivery system comprising (i) an AAV-ITR vector comprising a polynucleotide encoding an influenza-neutralizing antibody and (ii) a Rep78 vector.

[0235] Also provided is a kit comprising an AAV-ITR vector and a Rep vector, wherein the AAV-ITR vector comprises a polynucleotide encoding a therapeutic polypeptide, polynucleotide, or combination thereof. Also provided is a kit comprising an AAV-ITR vector and a Rep vector, wherein the AAV-ITR comprises a polynucleotide encoding a marker gene to be substituted by a polynucleotide encoding a therapeutic polypeptide, polynucleotide, or a combination thereof. In some aspects, the kit comprises reagents to prepare a lipidic delivery system or polymeric delivery system or a combination thereof to encapsulate the AAV-ITR vector and/or the Rep vector. The kits provided herein optionally include instructions for use.

### Inverted Terminal Repeats (ITR)

[0236] The AAV-ITR vectors of the AAV-ITR based gene delivery systems of the present disclosure contain 5′ and 3′ ITRs. As used herein, an “inverted terminal repeat” or “ITR” refers to a nucleic acid subsequence located at either the 5′ or 3′ end of the sequence, which comprises a set of nucleotides (initial sequence) followed downstream by its reverse complement, i.e., palindromic sequence. The intervening sequence of nucleotides between the initial sequence and the reverse complement can be any length and can contain a sequence of a gene of interest (GOI). ITRs are reported to be the minimum sequences required for AAV proviral integration. In some aspects, the ITR comprises a naturally occurring ITR, e.g., the ITR comprises all or a portion of a Parvovirus ITR. In some aspects, the ITR comprises a synthetic sequence. In one aspect, the first ITR or the second ITR comprises a synthetic sequence. In another aspect, each of the first ITR and the second ITR comprises a synthetic sequence. In some aspects, the first ITR or the second ITR comprises a naturally occurring sequence. In another aspect, each of the first ITR and the second ITR comprises a naturally occurring sequence.

[0237] The sequence from the 5′ ITR sequence from AAV serotype 1 corresponds to nucleotides 1 to 143 of the AAV2 complete genome available at Genbank NC_002077.1. The sequence of the 5′ ITR sequence from AAV serotype 2 corresponds to nucleotides 1 to 145 of the AAV1 complete genome available at Genbank NC_001401.2. In some aspects, the 5′ ITR comprises, consists, or consists essentially of the sequence set forth in SEQ ID NO: 58. In some aspects, the 3′ ITR comprises, consists, or consists essentially of the sequence set forth in SEQ ID NO: 59. The sequence of the 5′ ITR sequence from AAV serotype 3A corresponds to nucleotides 1 to 143 of the AAV3A complete genome available at Genbank JB292182.1. The sequence of the 5′ ITR sequence from AAV serotype 3B corresponds to nucleotides 1 to 143 of the AAV3B complete genome available at Genbank AF028705.1. The sequence of the 5′ ITR sequence from AAV serotype 4 corresponds to nucleotides 1 to 46 of the AAV4 complete genome available at Genbank NC_001829.1. The sequence of the 5′ ITR sequence from AAV serotype 7 corresponds to nucleotides 1 to 145 of the AAV7 complete genome available at Genbank ITR7 NC_006260.1. In some aspects, the ITR sequence is an ITR sequence from AAV serotype 5 (complete genome available at Genbank NC_006152.1), AAV serotype 6 (complete genome available at Genbank AF028704.1), AAV serotype 8 (complete genome available at Genbank NC_006261.1), AAV serotype 9 (complete genome available at Genbank AX753250.1), AAV serotype 10 (complete genome available at Genbank AY631965.1), AAV serotype 11 (complete genome available at Genbank AY631966.1), AAV serotype 12 (complete genome available at Genbank DQ813647.1), or AAV serotype 13 (complete genome available at Genbank EU285562.1).

[0238] In some aspects, 3′ ITR sequences are the reverse complement of the 5′ sequences. In some aspects, the ITR comprises an ITR from an AAV genome. In some aspects, the ITR is an ITR of an AAV genome selected from AAV1, AAV2, AAV3, AAV3B, AAV4, AAV5, AAV6, AAV7, AAV8, AAV9, AAV10, AAV11, AAV12, AAV13, and any combination thereof. In a particular aspect, the ITR is an ITR of the AAV2 genome. In some aspects, the ITR is a synthetic sequence genetically engineered to include at its 5′ and 3′ ends ITRs derived from one or more of AAV genomes. In some aspects, the ITRs are derived from the same genome, e.g., from the genome of the same virus, or from different genomes, e.g., from the genomes of two or more different AAV genomes. In some aspects, the ITRs are derived from the same AAV genome. In a specific aspect, the two ITRs present in the nucleic acid molecule of the disclosure are the same, and can in particular be AAV2 ITRs, AAV5 ITRs or AAV9 ITRs. In one particular aspect, the first ITR and the second ITR are identical.

[0239] In some aspects, the ITRs form hairpin loop structures. In one aspect, the first ITR forms a hairpin structure. In another aspect, the second ITR forms a hairpin structure. Still in another aspect, both the first ITR and the second ITR form hairpin structures.

[0240] In some aspects, an ITR in a polynucleotide described herein is a transcriptionally activated ITR. A transcriptionally-activated ITR can comprise all or a portion of a wild-type ITR that has been transcriptionally activated by inclusion of at least one transcriptionally active element. Various types of transcriptionally active elements are suitable for use in this context. In some aspects, the transcriptionally active element is a constitutive transcriptionally active element. Constitutive transcriptionally active elements provide an ongoing level of gene transcription, and are preferred when it is desired that the transgene be expressed on an ongoing basis. In other aspects, the transcriptionally active element is an inducible transcriptionally active element. Inducible transcriptionally active elements generally exhibit low activity in the absence of an inducer (or inducing condition), and are upregulated in the presence of the inducer (or switch to an inducing condition). Inducible transcriptionally active elements can be preferred when expression is desired only at certain times or at certain locations, or when it is desirable to titrate the level of expression using an inducing agent. Transcriptionally active elements can also be tissue-specific; that is, they exhibit activity only in certain tissues or cell types.

[0241] Transcriptionally active elements can be incorporated into an ITR in a variety of ways. In some aspects, a transcriptionally active element is incorporated 5′ to any portion of an ITR or 3′ to any portion of an ITR. In other aspects, a transcriptionally active element of a transcriptionally-activated ITR lies between two ITR sequences. If the transcriptionally active element comprises two or more elements, which must be spaced apart, those elements can alternate with portions of the ITR. In some aspects, a hairpin structure of an ITR is deleted and replaced with inverted repeats of a transcriptional element. This latter arrangement would create a hairpin mimicking the deleted portion in structure. Multiple tandem transcriptionally active elements can also be present in a transcriptionally-activated ITR, and these can be adjacent or spaced apart. In addition, protein-binding sites (e.g., Rep binding sites) can be introduced into transcriptionally active elements of the transcriptionally-activated ITRs. A transcriptionally active element can comprise any sequence enabling the controlled transcription of DNA by RNA polymerase to form RNA, and can comprise, for example, a transcriptionally active element, as defined below.

[0242] Transcriptionally-activated ITRs provide both transcriptional activation and ITR functions to the nucleic acid molecule in a relatively limited nucleotide sequence length which effectively maximizes the length of a transgene encoding a GOI which can be carried and expressed from the nucleic acid molecule. Incorporation of a transcriptionally active element into an ITR can be accomplished in a variety of ways. A comparison of the ITR sequence and the sequence requirements of the transcriptionally active element can provide insight into ways to encode the element within an ITR. For example, transcriptional activity can be added to an ITR through the introduction of specific changes in the ITR sequence that replicates the functional elements of the transcriptionally active element. A number of techniques exist in the art to efficiently add, delete, and/or change particular nucleotide sequences at specific sites (see, for example, Deng and Nickoloff (1992) Anal. Biochem. 200:81-88). Another way to create transcriptionally-activated ITRs involves the introduction of a restriction site at a desired location in the ITR. In addition, multiple transcriptionally activate elements can be incorporated into a transcriptionally-activated ITR, using methods known in the art.

[0243] By way of illustration, transcriptionally-activated ITRs can be generated by inclusion of one or more transcriptionally active elements such as: TATA box, GC box, CCAAT box, Spl site, Inr region, CRE (cAMP regulatory element) site, ATF-1/CRE site, APBβ box, APBα box, CArG box, CCAC box, or any other element involved in transcription as known in the art.

[0244] Any AAV ITR known in the art can be used in the compositions of the present disclosure. In some aspects, the AAV ITR is from an AAV serotype selected from the group consisting of AAV type 1, AAV type 2, AAV type 3, AAV type 3B, AAV type 4, AAV type 5, AAV type 6, AAV type 7, AAV type 8, AAV type 9, AAV type 10, AAV type 11, AAV type 12, AAV type 13, Rh10, Rh74, AAV-2i8, snake AAV, avian AAV, bovine AAV, canine AAV, equine AAV, ovine AAV, goat AAV, shrimp AAV, a synthetic AAV, an any combination thereof. In certain aspects, the AAV ITR is from an AAV type 2, e.g., AAV2.

[0245] For historical reasons and the sake of convenience, most of the AAV vectors contain the ITR of AAV serotype 2, the sole viral sequences required for the replication and packaging of the recombinant genome in AAV capsids.

TABLE 4
AAV ITR sequences

| AAV | 5′ ITR sequence SEQ | 3′ ITR sequence SEQ ID |
|---|---|---|
| Serotype | ID NO | NO |
| AAV1 | 60 | 61 |
| AAV2 | 62 | 63 |
| AAV3A | 64 | 65 |
| AAV4 | 66 | 67 |
| AAV5 | 68 | 69 |
| AAV6 | 70 | 71 |
| AAV7 | 72 | 73 |
| AAV8 | 74 | 75 |
| AAV9 | 76 | 77 |
| AAV10 | 78 | 79 |
| AAV11 | 80 | 81 |
| AAV12 | 82 | 83 |
| AAV13 | 84 | 85 |

[0246] ITR of AAV1 to 9 present a high degree of homology (82-90%), except for AAV5 (58%), resulting in differences in DNA cleavage specificity and nuclear factors involved in viral replication. Vector genomes carrying AAV ITR5 have been shown to be approximately 5 times more active than those based on ITR2. Similar experiments in mouse muscle with AAV1 and AAV6 capsid pseudotyped vectors also confirmed a higher efficiency of vectors based on AAV5 ITR compared to those based on the conventional AAV2 ITR, indicating that AAV5 ITR based AAV systems are more efficient systems to mediate gene expression than the standard AAV2 ITR based vector in particular for skeletal muscle targeting. See Le Bec et al. (2008) Musculoskeletal Gene and Cell Therapy: Bone, Joint, Tendon and Muscle Therapy, vol. 16, suppl. 1, S346.

[0247] ITRs contains three palindromic sequences (A-A′, B-B′, and C-C′ regions) and form a T-shaped structure. Deletion of the B-B′ and C-C′ regions of ITRs reduces rAAV productivity but increases transgene expression. See Zhou et al. (2017) Sci. Rep. 7, 5432. Accordingly, in some aspects of the present disclosure, the ITR does not contain a B-B′ and/or C-C′ region. In some aspects, the ITR does not contain a B-B′ and/or C-C′ region and includes only one palindromic sequence (A-A′ region). In some aspects, the ITR includes only one palindromic sequence (A-A′ region) and forms a U-shaped structure. In some aspects, the ITR comprises a sequence having 1, 2, 3, 4, 5, 6, 7, 8, 9, or 10 additional nucleotides at the 5′ end of an ITR sequence disclosed herein, wherein the ITR is capable of binding to a Rep protein (e.g., a Rep78 or Rep68 protein). In some aspects, the ITR comprises a sequence having 1, 2, 3, 4, 5, 6, 7, 8, 9, or 10 additional nucleotides at the 3′ end of an ITR sequence disclosed herein, wherein the ITR is capable of binding to a Rep protein (e.g., a Rep78 or Rep68 protein). In some aspects, the ITR comprises a sequence having 1, 2, 3, 4, 5, 6, 7, 8, 9, or 10 less nucleotides at the 5′ end of an ITR sequence disclosed herein, wherein the ITR is capable of binding to a Rep protein (e.g., a Rep78 or Rep68 protein). In some aspects, the ITR comprises a sequence having 1, 2, 3, 4, 5, 6, 7, 8, 9, or 10 less nucleotides at the 3′ end of an ITR sequence disclosed herein, wherein the ITR is capable of binding to a Rep protein (e.g., a Rep78 or Rep68 protein). In some aspects, the ITR comprises a sequence having 1, 2, 3, 4, 5, 6, 7, 8, 9, or 10 more nucleotides at the 5′ end and 1, 2, 3, 4, 5, 6, 7, 8, 9, or 10 more nucleotides at the 3′ end of an ITR sequence disclosed herein, wherein the ITR is capable of binding to a Rep protein (e.g., a Rep78 or Rep68 protein). In some aspects, the ITR comprises a sequence having 1, 2, 3, 4, 5, 6, 7, 8, 9, or 10 less nucleotides at the 5′ end and 1, 2, 3, 4, 5, 6, 7, 8, 9, or 10 less nucleotides at the 3′ end of an ITR sequence disclosed herein, wherein the ITR is capable of binding to a Rep protein (e.g., a Rep78 or Rep68 protein). In some aspects, the ITR comprises a sequence having 1, 2, 3, 4, 5, 6, 7, 8, 9, or 10 more nucleotides at the 5′ end and 1, 2, 3, 4, 5, 6, 7, 8, 9, or 10 less nucleotides at the 3′ end of an ITR sequence disclosed herein, wherein the ITR is capable of binding to a Rep protein (e.g., a Rep78 or Rep68 protein). In some aspects, the ITR comprises a sequence having 1, 2, 3, 4, 5, 6, 7, 8, 9, or 10 less nucleotides at the 5′ end and 1, 2, 3, 4, 5, 6, 7, 8, 9, or 10 more nucleotides at the 3′ end of an ITR sequence disclosed herein, wherein the ITR is capable of binding to a Rep protein (e.g., a Rep78 or Rep68 protein).

[0248] In some aspects, the ITR comprises, consists, or consists essentially of an ITR sequence disclosed herein except for 1, 2, 3, 4, 5, 6, 7, 8, 9, 10, 11, 12, 13, 14, 15, 16, 17, 18, 19, or 20 mutations, wherein the ITR is capable of binding to a Rep protein (e.g., a Rep78 or Rep68 protein). In some aspects, the ITR comprises, consists, or consists essentially of an ITR sequence having about 60%, about 65%, about 70%, about 75%, about 80%, about 85%, about 90%, about 95%, about 96%, about 97%, about 98%, or about 99% sequence identity to an ITR sequence disclosed herein, wherein the ITR is capable of binding to a Rep protein (e.g., a Rep78 or Rep68 protein). In general, the ITR of the present disclosure can be a functional variant or functional fragment of a naturally occurring ITR that has been engineered while preserving the Rep Binding Element (RBE) of the ITR.

### Rep Proteins

[0249] The Rep vector component of the AAV-ITR based gene delivery system of the present disclosure comprises an mRNA encoding a Parvovirus Rep protein, e.g., a Rep68 protein or a Rep78 protein.

[0250] The AAV rep gene, by using two promoters and alternative splicing, encodes four regulatory proteins that are dubbed Rep78, Rep68, Rep52 and Rep40. Rep proteins are required for viral genome replication and packaging. The Rep vectors of the present disclosure comprise an mRNA encoding a Rep protein, which can be naturally occurring or comprise a mutant or synthetic sequence. As used herein, the terms “Rep RNA” or “Rep mRNA” are interchangeable and refer to an RNA sequence that encodes an AAV Rep protein, a Rep78 protein or a Rep68 protein. The terms “Rep78 RNA” or “Rep78 mRNA” or “Rep78 RNA vector” or “Rep78 mRNA vector” or “Rep68 RNA” or Rep68 mRNA” or “Rep68 RNA vector” or “Rep68 mRNA vector” refer to an RNA sequence that respectively encodes an AAV Rep78 or AAV Rep68 protein. In some aspects, the Rep RNA encoding the Rep protein is produced in vitro, e.g., through in vitro transcription.

[0251] The present disclosure provides nucleic acids that encode an AAV Rep protein. In some aspects, the nucleic acids encode a Rep78 protein. In some aspects, the nucleic acids encode a Rep68 protein. In some aspects, the nucleic acid encoding a Rep78 protein is a ribonucleic acid (Rep78 RNA). In some aspects, the nucleic acid encoding a Rep68 protein is a ribonucleic acid (Rep68 RNA). In some aspects, the Rep78 RNA is an in vitro transcribed Rep78 mRNA. In some aspects, the Rep68 RNA is an in vitro transcribed Rep68 mRNA.

[0252] In some aspects, the Rep encoding nucleic acid comprises a synthetic sequence. In some aspects, the Rep78 encoding nucleic acid comprises a synthetic sequence. In some aspects, the Rep68 encoding nucleic acid comprises a synthetic sequence.

[0253] In some aspects, a Rep encoding nucleic acid is from an AAV genome selected from an AAV serotype AAV1, AAV2, AAV3, AAV3B, AAV4, AAV5, AAV6, AAV7, AAV8, AAV9, AAV10, AAV11, AAV12, AAV13 and any combination thereof. In some aspects, Rep78 encoding nucleic acid is from an AAV genome selected from AAV1, AAV2, AAV3, AAV3B, AAV4, AAV5, AAV6, AAV7, AAV8, AAV9, AAV10, AAV11, AAV12, AAV13 and any combination thereof. In some aspects, a Rep68 encoding nucleic acid is from an AAV genome selected from AAV1, AAV2, AAV3, AAV3B, AAV4, AAV5, AAV6, AAV7, AAV8, AAV9, AAV10, AAV11, AAV12, AAV13 and any combination thereof.

[0254] In some aspects, the Rep encoding RNA sequence is from the AAV1 genome. In some aspects, the Rep encoding RNA sequence is from the AAV2 genome. In some aspects, the Rep encoding RNA sequence is from the AAV3 genome. In some aspects, the Rep encoding RNA sequence is from the AAV3B genome. In some aspects, the Rep encoding RNA sequence is from the AAV4 genome. In some aspects, the Rep encoding RNA sequence is from the AAV5 genome. In some aspects, the Rep encoding RNA sequence is from the AAV6 genome. In some aspects, the Rep encoding RNA sequence is from the AAV7 genome. In some aspects, the Rep encoding RNA sequence is from the AAV8 genome. In some aspects, the Rep encoding RNA sequence is from the AAV9 genome. In some aspects, the Rep encoding RNA sequence is from the AAV10 genome. In some aspects, the Rep encoding RNA sequence is from the AAV11 genome. In some aspects, the Rep encoding RNA sequence is from the AAV12 genome. In some aspects, the Rep encoding RNA sequence is from the AAV13 genome.

[0255] In some aspects, the Rep protein encoded by a Rep vector of the present disclosure is a Rep protein variant that has about 80%, about 85%, about 90%, about 95%, about 96%, about 97% about 98%, or about 99% sequence identity to the sequence of AAV2Rep78. In some aspects, the Rep protein encoded by a Rep vector of the present disclosure is a Rep protein variant has about 80%, about 85%, about 90%, about 95%, about 96%, about 97%, about 98%, or about 99% sequence identity to the sequence of AAV2 Rep76. In some aspects, the Rep protein is a functional variant or functional fragment of a Rep78 or Rep68 protein that can bind to the Rep Binding Element (RBE) of the ITR.

TABLE 5
Human AAV Rep78 and Rep68 sequences

| | | Protein SEQ ID | Nucleic acid SEQ ID |
|---|---|---|---|
| Serotype | Rep type | NO | NO |
| AAV1 | 78 | 86 | 87 |
| | 68 | 88 | 89 |
| AAV2 | 78 | 90 | 91 |
| | 68 | 92 | 93 |
| AAV3 | 78 | 94 | 95 |
| | 68 | 96 | 97 |
| AAV3B | 78 | 98 | 99 |
| | 68 | 100 | 101 |
| AAV4 | 78 | 102 | 103 |
| | 68 | 104 | 105 |
| AAV5 | 78 | 106 | 107 |
| | 68 | 108 | 109 |
| AAV6 | 78 | 110 | 111 |
| | 68 | 112 | 113 |
| AAV7 | 78 | 114 | 115 |
| | 68 | 116 | 117 |
| AAV8 | 78 | 118 | 119 |
| | 68 | 120 | 121 |
| AAV9 | 78 | 122 | 123 |
| | 68 | 124 | 125 |
| AAV10 | 78 | 126 | 127 |
| | 68 | 128 | 129 |
| AAV11 | 78 | 130 | 131 |
| | 68 | 132 | 133 |
| AAV12 | 78 | 134 | 135 |
| | 68 | 136 | 137 |
| AAV13 | 78 | 138 | 139 |
| | 68 | 140 | 141 |

[0256] In some aspects, the Rep encoding RNA sequence is a Rep78 RNA sequence of an AAV serotype selected the group consisting of AAV1, AAV2, AAV3, AAV3B, AAV4, AAV5, AAV6, AAV7, AAV8, AAV9, AAV10, AAV11, AAV12, or AAV13. In some aspects, the Rep RNA sequence is a Rep78 RNA sequence of an AAV1. In some aspects, the Rep RNA sequence is a Rep78 RNA sequence of an AAV2. In some aspects, the Rep RNA sequence is a Rep78 RNA sequence of an AAV3. In some aspects, the Rep RNA sequence is a Rep78 RNA sequence of an AAV3B. In some aspects, the Rep RNA sequence is a Rep78 RNA sequence of an AAV4. In some aspects, the Rep RNA sequence is a Rep78 RNA sequence of an AAV5. In some aspects, the Rep RNA sequence is a Rep78 RNA sequence of an AAV6. In some aspects, the Rep RNA sequence is a Rep78 RNA sequence of an AAV7. In some aspects, the Rep RNA sequence is a Rep78 RNA sequence of an AAV8. In some aspects, the Rep RNA sequence is a Rep78 RNA sequence of an AAV9. In some aspects, the Rep RNA sequence is a Rep78 RNA sequence of an AAV10. In some aspects, the Rep RNA sequence is a Rep78 RNA sequence of an AAV11. In some aspects, the Rep RNA sequence is a Rep78 RNA sequence of an AAV12. In some aspects, the Rep RNA sequence is a Rep78 RNA sequence of an AAV13.

[0257] In some aspects, the Rep RNA sequence is a Rep68 RNA sequence of an AAV1. In some aspects, the Rep RNA sequence is a Rep68 RNA sequence of an AAV2. In some aspects, the Rep RNA sequence is a Rep68 RNA sequence of an AAV3. In some aspects, the Rep RNA sequence is a Rep68 RNA sequence of an AAV3B. In some aspects, the Rep RNA sequence is a Rep68 RNA sequence of an AAV4. In some aspects, the Rep RNA sequence is a Rep68 RNA sequence of an AAV5. In some aspects, the Rep RNA sequence is a Rep68 RNA sequence of an AAV6. In some aspects, the Rep RNA sequence is a Rep68 RNA sequence of an AAV7. In some aspects, the Rep RNA sequence is a Rep68 RNA sequence of an AAV8. In some aspects, the Rep RNA sequence is a Rep68 RNA sequence of an AAV9. In some aspects, the Rep RNA sequence is a Rep68 RNA sequence of an AAV10. In some aspects, the Rep RNA sequence is a Rep68 RNA sequence of an AAV11. In some aspects, the Rep RNA sequence is a Rep68 RNA sequence of an AAV12. In some aspects, the Rep RNA sequence is a Rep68 RNA sequence of an AAV13.

[0258] In some aspects, the Rep protein is a Rep78 or Rep68 protein selected from Genbak protein accession codes YP_680423.1, QDH44219.1, QDH44159.1, QDH44253.1, QDH44302.1, ASW20943.1, QDH44103.1, QDH44232.1, QDH44454.1, QDH44260.1, QDH44086.1, AAU05365.1, QDH44173.1, AAU05359.1, QDH44096.1, AAU05369.1, QDH44180.1, UM075523.1, QDH44214.1, QDH44461.1, UXD78474.1, UXD78506.1, QDH44187.1, QJS95374.1, QDH44267.1, UGV24180.1, UXD78434.1, QDH44344.1, UXD78466.1, UXD78578.1, QDH44330.1, UGV24174.1, UXD78586.1, QDH44440.1, QDH44398.1, QDH44384.1, QDH44110.1, QDH44152.1, AAU05367.1, UXD78562.1, QDH44117.1, UGV24183.1, UXD78546.1, UXD78450.1, UGV24172.1, UXD78530.1, UGV24181.1, AAU05363.1, QDH44405.1, QDH44433.1, QDH44370.1, QDH44412.1, QDH44138.1, QDH44309.1, QDH44079.1, QDH44323.1, QDH44377.1, QDH44145.1, QDH44419.1, QPP19815.1, QDH44447.1, QPP19823.1, QDH44426.1, QDH44337.1, UGV24184.1, UGV24168.1, QDH44288.1, QDH44316.1, UXD78538.1, QDH44239.1, UGV24188.1, ABZ10811.1, NP_044926.1, AAB95451.1, NP_043940.1, YP_077177.1, AAT46336.1, ABA71700.1, ABA71698.1, AAT46338.1, AB116638.1, APD78413.1, NP_049541.1, AAB95449.1, YP_077179.1, UGV24186.1, P03132.1, YP_680422.1, QDH44158.1, ASW20942.1, QDH44301.1, ABW34382.1, QDH44231.1, QDH44252.1, QDH44259.1, QDH44172.1, UXD78473.1, UXD78505.1, QDH44085.1, QDH44095.1, QDH44123.1, QDH44179.1, UXD78585.1, QDH44266.1, QDH44460.1, ACV74419.1, QDH44343.1, QDH44439.1, QDH44186.1, QDH44329.1, UXD78561.1, QDH44383.1, QDH44397.1, QDH44116.1, QDH44109.1, ACV74421.1, QDH44238.1, UXD78449.1, QDH44432.1, UXD78545.1, QDH44446.1, UXD78529.1, UXD78537.1, QDH44404.1, QDH44137.1, QDH44369.1, QDH44411.1, QDH44308.1, QDH44078.1, QDH44322.1, QDH44376.1, QDH44418.1, QDH44144.1, QDH44425.1, or QDH44315.1.

[0259] In some aspects, the Rep protein is a protein comprising a Rep protein catalytic-like domain (Interpro Accession No. IPR014835), i.e., a Rep_N domain. The Rep_N domain of the AAV Replication (Rep) protein is the catalytic domain of the Rep protein and has DNA binding and endonuclease activity. In some aspects, the Rep protein comprises a Rep_N domain form a parvovirus. In some aspects, the sequence encoding the Rep protein (i.e., a Rep_N domain-containing protein such as a Rep78 or Rep68) and the ITR sequences are selected, e.g., from the AAV2 Rep78, AAV2 Rep68, and AVV2 ITR homologous sequences in the genome of a parvovirus selected from the group consisting of Acheta domestica densovirus (Genbank NC_004290; SEQ ID NO: 142), Acheta domestica mini ambidensovirus (Genbank: NC_022564; SEQ ID NO: 143), Ambidensovirus_Croatia 17 S17 (Genbank: NC_077029; SEQ ID NO:144), Blattella germanica densovirus 1 (Genbank: NC_005041; SEQ ID NO:145), Bombus cryptarum densovirus (Genbank: NC_040626; SEQ ID NO:146), Bombyx mori densovirus 1 (Genbank: NC_003346; SEQ ID NO:147), Bombyx mori densovirus 5 (Genbank: NC_004287; SEQ ID NO: 148), Casphalia extranea densovirus (Genbank: NC_004288; SEQ ID NO:149), Sibine fusca densovirus (Genbank: NC_018399; SEQ ID NO:150), Cherax quadricarinatus densovirus (Genbank: NC_026943; SEQ ID NO:151), Culex pipiens densovirus (Genbank: NC_012685; SEQ ID NO:152), Danaus plexippus plexippus iteravirus (Genbank: NC_023842; SEQ ID NO:153), Decapod penstyldensovirus 1 (Genbank: NC_002190; SEQ ID NO:154), Dendrolimus punctatus densovirus (Genbank: NC_006555; SEQ ID NO:155), Diaphorina citri densovirus (Genbank: NC_030296; SEQ ID NO:156), Diatraea saccharalis densovirus (Genbank: NC_001899; SEQ ID NO:157), Dysaphis plantaginea densovirus (Genbank: NC_034532; SEQ ID NO:158), Galleria mellonella densovirus (Genbank: NC_004286; SEQ ID NO:159), Helicoverpa armigera densovirus (Genbank: NC_015718; SEQ ID NO:160), Junonia coenia densovirus (Genbank: NC_004284; SEQ ID NO:161), Mythimna loreyi densovirus (Genbank: NC_005341; SEQ ID NO:162), Pseudoplusia includens densovirus (Genbank: NC_019492; SEQ ID NO:163), Mosquito densovirus BR/07 (Genbank: NC_015115; SEQ ID NO:164), Myzus persicae densovirus 1 (Genbank: NC_005040; SEQ ID NO:165), Papilio polyxenes densovirus (Genbank: NC_018450; SEQ ID NO:166), Parus major densovirus (Genbank: NC_031450; SEQ ID NO:167), Penaeus monodon hepandensovirus 1 (Genbank: NC_007218; SEQ ID NO:168), Penaeus monodon hepandensovirus 4 (Genbank: NC_011545; SEQ ID NO:169), Periplaneta fuliginosa densovirus (NC_000936; SEQ ID NO:170), Planococcus citri densovirus (Genbank: NC_004289; SEQ ID NO:171), Sea star-associated densovirus (Genbank: NC_038532; SEQ ID NO:172), Solenopsis invicta densovirus (Genbank: NC_022748; SEQ ID NO:173), Aedes aegypti densovirus 2 (Genbank: NC_012636; SEQ ID NO:174), Anopheles gambiae densovirus (Genbank: NC_011317; SEQ ID NO:175), Aedes albopictus densovirus 2 (Genbank: NC_004285; SEQ ID NO:176), Fenneropenaeus chinensis hepandensovirus (Genbank: NC_014357; SEQ ID NO:177), Mouse kidney parvovirus (Genbank: NC_040843; SEQ ID NO:178), Penaeus stylirostris penstyldensovirus 1 (Genbank: NC_039043; SEQ ID NO:179), Porcine parvovirus 7 (Genbank: NC_040562; SEQ ID NO:180), Rat parvovirus 2 (Genbank: NC_055465; SEQ ID NO:181), Syngnathus scovelli chapparvovirus (Genbank: NC_055527; SEQ ID NO:182), Ursus americanus parvovirus (Genbank: NC_077031; SEQ ID NO:183), Cachavirus 1A (Genbank: NC_076028; SEQ ID NO:184), Chicken chapparvovirus HK (Genbank: NC_075989; SEQ ID NO:185), Turkey parvovirus 2 (Genbank: NC_075985; SEQ ID NO:186), Adeno-associated virus (Genbank: NC_040671; SEQ ID NO:187), Adeno-associated virus 1/Dependoparvovirus primate 1 (Genbank: NC_002077; SEQ ID NO:188), Adeno-associated virus 3/Dependoparvovirus primate 1 (Genbank: NC_001729; SEQ ID NO:189), Adeno-associated virus 4/Dependoparvovirus primate 1 (Genbank: NC_001829; SEQ ID NO:190), Adeno-associated virus 7 Dependoparvovirus primate 1 (Genbank: NC_006260; SEQ ID NO:191), Adeno-associated virus 8/Dependoparvovirus primate 1 (Genbank: NC_006261; SEQ ID NO:192), Adeno-associated virus 2/Dependoparvovirus primate 1 (Genbank: NC_001401; SEQ ID NO:193), Aleutian mink disease virus/Amdoparvovirus carnivoran 1 (Genbank: NC_001662; SEQ ID NO:194), Amdoparvovirus sp. (Genbank: NC_031751; SEQ ID NO:195), Artibeus jamaicensis parvovirus 1/Artiparvovirus chiropteran 1 (Genbank: NC_016752; SEQ ID NO:196), Avian adeno-associated virus ATCC VR-865/Dependoparvovirus avian 1 (Genbank: NC_004828; SEQ ID NO:197), Avian adeno-associated virus strain DA-1/Dependoparvovirus avian 1 (Genbank: NC_006263; SEQ ID NO:198), Bat adeno-associated virus YNM Dependoparvovirus chiropteran 1 (Genbank: NC_014468; SEQ ID NO:199), Bat bocavirus (Genbank: NC_029300; SEQ ID NO:200), Bat bocavirus WM40/Bocaparvovirus chiropteran 2 (Genbank: NC_039046; SEQ ID NO:201), Bat bocavirus AM30/Bocaparvovirus chiropteran 3 (Genbank: NC_039047; SEQ ID NO:202), Bearded dragon parvovirus/Dependoparvovirus squamate 2 (Genbank: NC_027429; SEQ ID NO:203), Bocaparvovirus lagomorph 1 (Genbank: NC_028973; SEQ ID NO:204), Bocaparvovirus primate 1 (Genbank: NC_007455; SEQ ID NO:205), Bocaparvovirus primate 1 (Genbank: NC_075120; SEQ ID NO:206), Bocaparvovirus primate 3 (Genbank: NC_055583; SEQ ID NO:207), Bocavirus gorilla/GBoV1/2009/Bocaparvovirus primate 1 (Genbank: NC_014358; SEQ ID NO:208), Human bocavirus 3/Bocaparvovirus primate 1 (Genbank: NC_012564; SEQ ID NO:209), Bocavirus pig/SX/China/2010/Bocaparvovirus ungulate 3 (Genbank: NC_038537; SEQ ID NO:210), Bosavirus MS-2016a/Copiparvovirus ungulate 5 (Genbank: NC_031959; SEQ ID NO:211), Bovine adeno-associated virus Dependoparvovirus mammalian 1 (Genbank NC_005889; SEQ ID NO:212), Adeno-associated virus 5/Dependoparvovirus mammalian 1 (Genbank: NC_006152; SEQ ID NO:213), Bovine hokovirus 1/Tetraparvovirus ungulate 1 (Genbank: NC_038898; SEQ ID NO:214), Bovine parvovirus/Bocaparvovirus ungulate 1 (Genbank: NC_001540; SEQ ID NO:215), Bovine parvovirus 1/Bocaparvovirus ungulate 1 (Genbank: NC_038895; SEQ ID NO:216), Bovine parvovirus 2/Copiparvovirus ungulate 1 (Genbank: NC_006259; SEQ ID NO:217), Bovine parvovirus 3/Erythroparvovirus ungulate 1 (Genbank: NC_074970; SEQ ID N02:218), Bovine parvovirus 3/Erythroparvovirus ungulate 1 (Genbank: NC_037053; SEQ ID NO:219), Bufavirus 3 (Genbank: NC_024888; SEQ ID NO:220), California sea lion adeno-associated virus 1 (Genbank: NC_038539; SEQ ID NO:221), California sea lion bocavirus 1/Bocaparvovirus pinniped 1 (Genbank: NC_038535; SEQ ID NO:222), California sea lion bocavirus 3/Bocaparvovirus pinniped 2 (Genbank: NC_038536; SEQ ID NO:223), Canine bocavirus 1/Bocaparvovirus carnivoran 2 (Genbank: NC_020499; SEQ ID NO:224), Canine minute virus/Bocaparvovirus carnivoran 1 (Genbank: NC_004442; SEQ ID NO:225), Canine parvovirus/Protoparvovirus carnivoran 1 (Genbank: NC_001539; SEQ ID NO:226), Chicken parvovirus ABU-P1/Aveparvovirus galliform 1 (Genbank: NC_024452; SEQ ID NO:227), Turkey parvovirus 1078/Aveparvovirus galliform 1 (Genbank: NC_024454; SEQ ID NO:228), Turkey parvovirus 260/Aveparvovirus galliform 1 (Genbank: NC_038534; SEQ ID NO:229), Chipmunk parvovirus Erythroparvovirus rodent 1 (Genbank: NC_038543; SEQ ID NO:230), Cutavirus Protoparvovirus primate 3 (Genbank: NC_039050; SEQ ID NO:231), Dromedary camel bocaparvovirus 1/Bocaparvovirus ungulate 7 (Genbank: NC_035186; SEQ ID NO:232), Dromedary camel bocaparvovirus 2/Bocaparvovirus ungulate 8 (Genbank: NC_035185; SEQ ID NO:233), Eidolon helvum (bat) parvovirus/Tetraparvovirus chiropteran 1 (Genbank: NC_016744; SEQ ID NO:234), Equine parvovirus H (Genbank: NC_040652; SEQ ID NO:235), Feline bocaparvovirus 2/Bocaparvovirus carnivoran 4 (Genbank: NC_022800; SEQ ID NO:236), Feline bocaparvovirus 3/Bocaparvovirus carnivoran 5 (Genbank: NC_039044; SEQ ID NO:237), Feline bocavirus/Bocaparvovirus carnivoran 3 (Genbank: NC_017823; SEQ ID NO:238), Goose parvovirus/Dependoparvovirus anseriform 1 (Genbank: NC_001701; SEQ ID NO:239), Muscovy duck parvovirus/Dependoparvovirus anseriform 1 (Genbank: NC_006147; SEQ ID NO:240), Gray fox amdovirus/Amdoparvovirus carnivoran 2 (Genbank: NC_038533; SEQ ID NO:241), Human bocavirus 2c PK/Bocaparvovirus primate 2 (Genbank: NC_012042; SEQ ID NO:242), Human bocavirus 4 NI/Bocaparvovirus primate 2 (Genbank: NC_012729; SEQ ID NO:243), Human erythrovirus V9 (Genbank: NC_004295; SEQ ID NO:244), Human parvovirus 4 GI/Tetraparvovirus primate 1 (Genbank: NC_007018; SEQ ID NO:245), Human parvovirus B19/Erythroparvovirus primate 1 (Genbank: NC_000883; SEQ ID NO:246), Lupine bocavirus (Genbank: NC_040533; SEQ ID NO:247), Megabat bufavirus 1/Protoparvovirus chiropteran 1 (Genbank: NC_029797; SEQ ID NO:248), Miniopterus schreibersii bat bocavirus/Bocaparvovirus chiropteran 4 (Genbank: NC_039048; SEQ ID NO:249), Mink bocavirus 1/Bocaparvovirus carnivoran 6 (Genbank: NC_030873; SEQ ID NO:250), Minute virus of mice/Protoparvovirus rodent 1 (Genbank: NC_001510; SEQ ID NO:251), Murine adeno-associated virus 1/Dependoparvovirus rodent 1 (Genbank: NC_055485; SEQ ID NO:252), Murine adeno-associated virus 2/Dependoparvovirus rodent 2 (Genbank: NC_055486; SEQ ID NO:253), Murine bocavirus/Bocaparvovirus rodent 2 (Genbank: NC_055487; SEQ ID NO:254), Myotis myotis bocavirus 1/Bocaparvovirus chiropteran 1 (Genbank: NC_039045; SEQ ID NO:255), Ovine hokovirus/Tetraparvovirus ungulate 4 (Genbank: NC_038547; SEQ ID NO:256), Parvovirus NIH-CQV (Genbank: NC_022089; SEQ ID NO:257), Parvovirus YX-2010/CHN/Tetraparvovirus ungulate 3 (Genbank: NC_038883; SEQ ID NO:258), Porcine parvovirus 2/Tetraparvovirus ungulate 3 (Genbank: NC_025965; SEQ ID NO:259), Pig-tailed macaque parvovirus/Erythroparvovirus primate 4 (Genbank: NC_038542; SEQ ID NO:260), Porcine bocavirus (Genbank: NC_023673; SEQ ID NO:261), Porcine bocavirus 1 pig/ZJD/China/2006/Bocaparvovirus ungulate 2 (Genbank: NC_024453; SEQ ID NO:262), Porcine bocavirus 3/Bocaparvovirus ungulate 5 (Genbank: NC_016031; SEQ ID NO:263), Porcine bocavirus 4-1/Bocaparvovirus ungulate 5 (Genbank: NC_016032; SEQ ID NO:264), Porcine bocavirus 5/JS677 (Genbank: NC_016647; SEQ ID NO:265), Porcine bocavirus H18/Bocaparvovirus ungulate 4 (Genbank: NC_038538; SEQ ID NO:266), Porcine hokovirus/Tetraparvovirus ungulate 2 (Genbank: NC_038546; SEQ ID NO:267), Porcine partetravirus (Genbank: NC_022104; SEQ ID NO:268), Porcine parvovirus/Protoparvovirus ungulate 1 (Genbank: NC_001718; SEQ ID NO:269), Porcine parvovirus 4/Copiparvovirus ungulate 2 (Genbank: NC_014665; SEQ ID NO:270), Porcine parvovirus 5 (Genbank: NC_023020; SEQ ID NO:271), Porcine parvovirus 6/Copiparvovirus ungulate 4 (Genbank: NC_023860; SEQ ID NO:272), Protoparvovirus Zsana/2013/HUN/Protoparvovirus ungulate 2 (Genbank: NC_043446; SEQ ID NO:273), Protoparvovirus eulipotyphla 1 (Genbank: NC_026815; SEQ ID NO:274), Protoparvovirus primate 1 (Genbank: NC_038544; SEQ ID NO:275), Raccoon dog amdovirus/Amdoparvovirus carnivoran 3 (Genbank: NC_025825; SEQ ID NO:276), Rat bocavirus/Bocaparvovirus rodent 1 (Genbank: NC_029133; SEQ ID NO:277), Rat bufavirus SY-2015/Protoparvovirus rodent 3 (Genbank: NC_028650; SEQ ID NO:278), Ratparvovirus 1/Protoparvovirus rodent 2 (Genbank: NC_038545; SEQ ID NO:279), Red-crowned crane parvovirus/Aveparvovirus gruiform 1 (Genbank: NC_040672; SEQ ID NO:280), Red-crowned crane parvovirus/Aveparvovirus gruiform 1 (Genbank: NC_040603; SEQ ID NO:281), Rhesus macaque parvovirus Erythroparvovirus primate 3 (Genbank: NC_038541; SEQ ID NO:282), Rhinolophus pusillus bocaparvovirus 1 (Genbank: NC_040623; SEQ ID NO:283), Rhinolophus pusillus bocaparvovirus 2 (Genbank: NC_040694; SEQ ID NO:284), Rhinolophus sinicus bocaparvovirus (Genbank: NC_031695; SEQ ID NO:285), Roe deer copiparvovirus/Copiparvovirus ungulate 3 (Genbank: NC_055518; SEQ ID NO:286), Rousettus leschenaultii bocaparvovirus 1/Bocaparvovirus chiropteran 5 (Genbank: NC_040695; SEQ ID NO:287), Seal parvovirus/Erythroparvovirus pinniped 1 (Genbank: NC_055458; SEQ ID NO:288), Simian parvovirus/Erythroparvovirus primate 2 (Genbank: NC_038540; SEQ ID NO:289), Skunk amdoparvovirus/Amdoparvovirus carnivoran 4 (Genbank: NC_034445; SEQ ID NO:290), Snake adeno-associated virus/Dependoparvovirus squamate 1 (Genbank: NC_006148; SEQ ID NO:291), Tetraparvovirus sp. (Genbank: NC_031670; SEQ ID NO:292), Tetraparvovirus ungulate 1 (Genbank: NC_028136; SEQ ID NO:293), Tetraparvovirus ungulate 3 (Genbank: NC_035180; SEQ ID NO:294), Ungulate bocaparvovirus 6/Bocaparvovirus ungulate 6 (Genbank: NC_030402; SEQ ID NO:295), Wuhary parvovirus 1/Protoparvovirus primate 2 (Genbank: NC_039049; SEQ ID NO:296), Red panda amdoparvovirus/Amdoparvovirus carnivoran 5 (Genbank: NC_077138; SEQ ID NO:297), Desmodus rotundus parvovirus (Genbank: NC_032097; SEQ ID NO:298), Sea otter parvovirus 1 (Genbank: NC_030837; SEQ ID NO:299), Sesavirus CSL10538 (Genbank: NC_026251; SEQ ID NO:300), Slow loris parvovirus 1 (Genbank: NC_025891; SEQ ID NO:301), Canine minute virus/Bocaparvovirus carnivoran 1 (Genbank: NC_075119; SEQ ID NO:302), Porcine parvovirus 6/Copiparvovirus ungulate 4 (Genbank: NC_075986; SEQ ID NO:303), Tusavirus 1/Protoparvovirus incertum 1 (Genbank: NC_075988; SEQ ID NO:304), Dromedary camel bocaparvovirus 1/Bocaparvovirus ungulate 7 (Genbank: NC_075998; SEQ ID NO:305), Equine parvovirus H (Genbank: NC_076001; SEQ ID NO:306), Fox parvovirus/Protoparvovirus carnivoran 4 (Genbank: NC_076133; SEQ ID NO:307), Canine protoparvovirus (Genbank: NC_076185; SEQ ID NO:308), Vicugna pacos bocaparvovirus/Bocaparvovirus ungulate 9 (Genbank: NC_076293; SEQ ID NO:309), Feline Dependoparvovirus/Dependoparvovirus carnivoran 1 (Genbank: NC_076473; SEQ ID NO:310), Canine bocavirus 3 (Genbank: NC_076995; SEQ ID NO:311), Rodent tetraparvovirus (Genbank: NC_077009; SEQ ID NO:312), Opossum tetraparvovirus (Genbank: NC_077010; SEQ ID NO:313), Pileated finch aveparvovirus (Genbank: NC_077011; SEQ ID NO:314), Rodent bocavirus (Genbank: NC_077012; SEQ ID NO:315), Desmodus rotundus dependoparvovirus (Genbank: NC_077013; SEQ ID NO:316), Avian chapparvovirus (Genbank: NC_077032; SEQ ID NO:317), Avian adeno-associated virus/Dependoparvovirus avian 1 (Genbank: NC_077033; SEQ ID NO:318), Macaca fascicularis chapparvovirus (Genbank: NC_077037; SEQ ID NO:319), Duck-associated chapparvovirus 1 (Genbank: NC_077098: SEQ ID NO:321), Duck-associated chapparvovirus 2 (Genbank: NC_077099; SEQ ID NO:322), Equine protoparvovirus (Genbank: NC_077112; SEQ ID NO:323), Newlavirus (Genbank: NC_077148; SEQ ID NO:324), Parvovirinae sp. (Genbank: NC_077156; SEQ ID NO:325), Feline panleukopenia virus FPV/INDIA/MZ26/Protoparvovirus carnivoran 1 (Genbank: PP035815; SEQ ID NO:326), Feline panleukopenia virus FPV/INDIA/MZ33/Protoparvovirus carnivoran 1 (Genbank: PP035816; SEQ ID NO:327), Feline panleukopenia virus FPV/INDIA/MZ35/Protoparvovirus carnivoran 1 (Genbank: PP035817; SEQ ID NO:328), Protoparvovirus carnivoran1/Protoparvovirus carnivoran 1 (Genbank: PP049248; SEQ ID NO:329), Goose parvovirus/Dependoparvovirus anseriform 1 (Genbank: PP058119; SEQ ID NO:330), Canine parvovirus 2b Arg22/Protoparvovirus carnivoran 1 (Genbank: OK888554; SEQ ID NO:331), Canine parvovirus 2c Arg35/Protoparvovirus carnivoran 1 (Genbank: OK888555; SEQ ID NO:332), Canine parvovirus 2a Arg41/Protoparvovirus carnivoran 1 (Genbank: OK888556; SEQ ID NO:333), Canine parvovirus 2c Arg 43/Protoparvovirus carnivoran 1 (Genbank: OK888557; SEQ ID NO:334), Canine parvovirus 2c Arg45/Protoparvovirus carnivoran 1 (Genbank: OK888558; SEQ ID NO:335), Canine parvovirus 2c UY382/Protoparvovirus carnivoran 1 (Genbank: OK888559; SEQ ID NO:336), Canine parvovirus 2a UY386/Protoparvovirus carnivoran 1 (Genbank: OK888560; SEQ ID NO:337), Canine parvovirus 2c UY391/Protoparvovirus carnivoran 1 (Genbank: OK888561; SEQ ID NO:338), Canine parvovirus 2a UY397/Protoparvovirus carnivoran 1 (Genbank: OK888562; SEQ ID NO:339), Canine parvovirus 2a UY406/Protoparvovirus carnivoran 1 (Genbank: OK888563; SEQ ID NO:340), Canine parvovirus 2c UY408/Protoparvovirus carnivoran 1 (Genbank: OK888564; SEQ ID NO:341), Canine parvovirus 2c UY410/Protoparvovirus carnivoran 1 (Genbank: OK888565; SEQ ID NO:342), Canine parvovirus 2c UY423/Protoparvovirus carnivoran 1 (Genbank: OK888566; SEQ ID NO:343), Canine parvovirus 2c UY426/Protoparvovirus carnivoran 1 (Genbank: OK888567; SEQ ID NO:344), Canine parvovirus 2a UY427/Protoparvovirus carnivoran 1 (Genbank: OK888568; SEQ ID NO:345), Canine parvovirus 2c UY430/Protoparvovirus carnivoran 1 (Genbank: OK888569; SEQ ID NO:346), Canine parvovirus 2a UY443/Protoparvovirus carnivoran 1 (Genbank: OK888570; SEQ ID NO:347), Canine parvovirus 2a UY445/Protoparvovirus carnivoran 1 (Genbank: OK888571; SEQ ID NO:348), Canine parvovirus 2a UY443/Protoparvovirus carnivoran 1 (Genbank: OK888572; SEQ ID NO:349), Canine parvovirus 2a UY459/Protoparvovirus carnivoran 1 (Genbank: OK888573; SEQ ID NO:350), Canine parvovirus 2a UY463/Protoparvovirus carnivoran 1 (Genbank: OK888574; SEQ ID NO:351), Canine parvovirus 2c UY467/Protoparvovirus carnivoran 1 (Genbank: OK888575; SEQ ID NO:352), Canine parvovirus 2a UY470/Protoparvovirus carnivoran 1 (Genbank: OK888576; SEQ ID NO:353), Canine parvovirus 2a UY476A/Protoparvovirus carnivoran 1 (Genbank: OK888577; SEQ ID NO:354), Canine parvovirus 2a UY486/Protoparvovirus carnivoran 1 (Genbank: OK888578; SEQ ID NO:355), Canine parvovirus 2a UY492/Protoparvovirus carnivoran 1 (Genbank: OK888579; SEQ ID NO:356), Canine parvovirus 2a UY503/Protoparvovirus carnivoran 1 (Genbank: OK888580; SEQ ID NO:357), Canine parvovirus 2a UY520/Protoparvovirus carnivoran 1 (Genbank: OK888581; SEQ ID NO:358), Canine parvovirus 2a UY530/Protoparvovirus carnivoran 1 (Genbank: OK888582; SEQ ID NO:359), Canine parvovirus 2a UY540/Protoparvovirus carnivoran 1 (Genbank: OK888583; SEQ ID NO:360), Canine parvovirus 2a UY568/Protoparvovirus carnivoran 1 (Genbank: OK888584; SEQ ID NO:361), Canine parvovirus 2a UY579/Protoparvovirus carnivoran 1 (Genbank: OK888585; SEQ ID NO:362), Canine parvovirus 2a UY593/Protoparvovirus carnivoran 1 (Genbank: OK888586; SEQ ID NO:363), Canine parvovirus 2a UY607/Protoparvovirus carnivoran 1 (Genbank: OK888587; SEQ ID NO:364), Canine parvovirus 2a UY618/Protoparvovirus carnivoran 1 (Genbank: OK888588; SEQ ID NO:365), Canine parvovirus 2a UY621/Protoparvovirus carnivoran 1 (Genbank: OK888589; SEQ ID NO:366), Canine parvovirus 2/Protoparvovirus carnivoran 1 (Genbank: OR037209; SEQ ID NO:367), Canine parvovirus 2/Protoparvovirus carnivoran 1 (Genbank: OR051684; SEQ ID NO:368), Canine parvovirus 2/Protoparvovirus carnivoran 1 (Genbank: OR051685; SEQ ID NO:369), Canine parvovirus 2/Protoparvovirus carnivoran 1 (Genbank: OR051686; SEQ ID NO:370), Human parvovirus B19/Erythroparvovirus primate 1 (Genbank: OR999319; SEQ ID NO:371), Human parvovirus 4/Tetraparvovirus primate 1 (Genbank: OR999320; SEQ ID NO:372), Cutavirus/Protoparvovirus primate 3 (Genbank: PP001440; SEQ ID NO:373), Cutavirus/Protoparvovirus primate 3 (Genbank: PP001441; SEQ ID NO:374), Cutavirus/Protoparvovirus primate 3 (Genbank: PP001442; SEQ ID NO:375), Cutavirus/Protoparvovirus primate 3 (Genbank: PP001443; SEQ ID NO:376), Cutavirus/Protoparvovirus primate 3 (Genbank: PP001444; SEQ ID NO:377), Cutavirus/Protoparvovirus primate 3 (Genbank: PP001445; SEQ ID NO:378), Cutavirus/Protoparvovirus primate 3 (Genbank: PP001446; SEQ ID NO:379), Canine parvovirus/Protoparvovirus carnivoran 1 (Genbank: OR992670; SEQ ID NO:380), Canine parvovirus/Protoparvovirus carnivoran 1 (Genbank: OR992671; SEQ ID NO:381), Canine parvovirus/Protoparvovirus carnivoran 1 (Genbank: OR992672; SEQ ID NO:382), Canine parvovirus/Protoparvovirus carnivoran 1 (Genbank: OR992673; SEQ ID NO:383), Canine parvovirus/Protoparvovirus carnivoran 1 (Genbank: OR992674; SEQ ID NO:384), Canine parvovirus/Protoparvovirus carnivoran 1 (Genbank: OR992675; SEQ ID NO:385), Feline panleukopenia virus Protoparvovirus carnivoran 1 (Genbank: OP985508; SEQ ID NO:386), and Feline panleukopenia virus Protoparvovirus carnivoran 1 (Genbank: OP985509; SEQ ID NO:387).

[0260] In the list above, when two names are separated by “/” the first name corresponds to the serotype of the virus and the second name corresponds to the species of the virus. In some aspects, the serotype of a virus can be followed by the isolate name. For example, in the entry “Canine parvovirus 2b Arg22/Protoparvovirus carnivoran 1,” the species name is “Protoparvovirus carnivoran 1,” the serotype is “Canine parvovirus 2b,” and the isolate is “Arg22.”

[0261] In some aspects, the mRNA sequence encoding the Rep78 protein, e.g., an AAV2 Rep78 protein or an ortholog thereof, is derived from the genome of a parvovirus having a genomic sequence selected from the group consisting of Genbank Acc. No. NC_004290, NC_022564, NC_077029, NC_005041, NC_040626, NC_003346, NC_004287, NC_004288, NC_018399, NC_026943, NC_012685, NC_023842, NC_002190, NC_006555, NC_030296, NC_001899, NC_034532, NC_004286, NC_015718, NC_004284, NC_005341, NC_019492, NC_015115, NC_005040, NC_018450, NC_031450, NC_007218, NC_011545, NC_000936, NC_004289, NC_038532, NC_022748, NC_012636, NC_011317, NC_004285, NC_014357, NC_040843, NC_039043, NC_040562, NC_055465, NC_055527, NC_077031, NC_076028, NC_075989, NC_075985, NC_040671, NC_002077, NC_001729, NC_001829, NC_006260, NC_006261, NC_001401, NC_001662, NC_031751, NC_016752, NC_004828, NC_006263, NC_014468, NC_029300, NC_03904, NC_039047, NC_027429, NC_028973, NC_007455, NC_075120, NC_055583, NC_014358, NC_012564, NC_038537, NC_031959, NC_005889, NC_006152, NC_038898, NC_001540, NC_038895, NC_006259, NC_074970, NC_037053, NC_024888, NC_038539, NC_038535, NC_038536, NC_020499, NC_004442, NC_001539, NC_024452, NC_024454, NC_038534, NC_038543, NC_039050, NC_035186, NC_035185, NC_016744, NC_040652, NC_022800, NC_039044, NC_017823, NC_001701, NC_006147, NC_038533, NC_012042, NC_012729, NC_004295, NC_007018, NC_000883, NC_040533, NC_029797, NC_039048, NC_030873, NC_001510, NC_055485, NC_055486, NC_055487, NC_039045, NC_038547, NC_022089, NC_038883, NC_025965, NC_038542, NC_023673, NC_024453, NC_016031, NC_016032, NC_016647, NC_038538, NC_038546, NC_022104, NC_001718, NC_014665, NC_023020, NC_023860, NC_043446, NC_026815, NC_038544, NC_025825, NC_029133, NC_028650, NC_038545, NC_040672, NC_040603, NC_038541, NC_040623, NC_040694, NC_031695, NC_055518, NC_040695, NC_055458, NC_038540, NC_034445, NC_006148, NC_031670, NC_028136, NC_035180, NC_030402, NC_039049, NC_077138, NC_032097, NC_030837, NC_026251, NC_025891, NC_075119, NC_075986, NC_075988, NC_075998, NC_076001, NC_076133, NC_076185, NC_076293, NC_076473, NC_076995, NC_077009, NC_077010, NC_077011, NC_077012, NC_077013, NC_077032, NC_077033, NC_077037, NC_077098, NC_077099, NC_077112, NC_077148, NC_077156, PP035815, PP035816, PP035817, PP049248, PP058119, OK888554, OK888555, OK888556, OK888557, OK888558, OK888559, OK888560, OK888561, OK888562, OK888563, OK888564, OK888565, OK888566, OK888567, OK888568, OK888569, OK888570, OK888571, OK888572, OK888573, OK888574, OK888575, OK888576, OK888577, OK888578, OK888579, OK888580, OK888581, OK888582, OK888583, OK888584, OK888585, OK888586, OK888587, OK888588, OK888589, OR037209, OR051684, OR051685, OR051686, OR999319, OR999320, PP001440, PP001441, PP001442, PP001443, PP001444, PP001445, PP001446, OR992670, OR992671, OR992672, OR992673, OR992674, OR992675, OP985508, and OP985509.

[0262] In some aspects, the mRNA sequence encoding the Rep68 protein, e.g., an AAV2 Rep78 protein or an ortholog thereof, is derived from the genome of a parvovirus having a genomic sequence selected from the group consisting of Genbank Acc. No. NC_004290, NC_022564, NC_077029, NC_005041, NC_040626, NC_003346, NC_004287, NC_004288, NC_018399, NC_026943, NC_012685, NC_023842, NC_002190, NC_006555, NC_030296, NC_001899, NC_034532, NC_004286, NC_015718, NC_004284, NC_005341, NC_019492, NC_015115, NC_005040, NC_018450, NC_031450, NC_007218, NC_011545, NC_000936, NC_004289, NC_038532, NC_022748, NC_012636, NC_011317, NC_004285, NC_014357, NC_040843, NC_039043, NC_040562, NC_055465, NC_055527, NC_077031, NC_076028, NC_075989, NC_075985, NC_040671, NC_002077, NC_001729, NC_001829, NC_006260, NC_006261, NC_001401, NC_001662, NC_031751, NC_016752, NC_004828, NC_006263, NC_014468, NC_029300, NC_03904, NC_039047, NC_027429, NC_028973, NC_007455, NC_075120, NC_055583, NC_014358, NC_012564, NC_038537, NC_031959, NC_005889, NC_006152, NC_038898, NC_001540, NC_038895, NC_006259, NC_074970, NC_037053, NC_024888, NC_038539, NC_038535, NC_038536, NC_020499, NC_004442, NC_001539, NC_024452, NC_024454, NC_038534, NC_038543, NC_039050, NC_035186, NC_035185, NC_016744, NC_040652, NC_022800, NC_039044, NC_017823, NC_001701, NC_006147, NC_038533, NC_012042, NC_012729, NC_004295, NC_007018, NC_000883, NC_040533, NC_029797, NC_039048, NC_030873, NC_001510, NC_055485, NC_055486, NC_055487, NC_039045, NC_038547, NC_022089, NC_038883, NC_025965, NC_038542, NC_023673, NC_024453, NC_016031, NC_016032, NC_016647, NC_038538, NC_038546, NC_022104, NC_001718, NC_014665, NC_023020, NC_023860, NC_043446, NC_026815, NC_038544, NC_025825, NC_029133, NC_028650, NC_038545, NC_040672, NC_040603, NC_038541, NC_040623, NC_040694, NC_031695, NC_055518, NC_040695, NC_055458, NC_038540, NC_034445, NC_006148, NC_031670, NC_028136, NC_035180, NC_030402, NC_039049, NC_077138, NC_032097, NC_030837, NC_026251, NC_025891, NC_075119, NC_075986, NC_075988, NC_075998, NC_076001, NC_076133, NC_076185, NC_076293, NC_076473, NC_076995, NC_077009, NC_077010, NC_077011, NC_077012, NC_077013, NC_077032, NC_077033, NC_077037, NC_077098, NC_077099, NC_077112, NC_077148, NC_077156, PP035815, PP035816, PP035817, PP049248, PP058119, OK888554, OK888555, OK888556, OK888557, OK888558, OK888559, OK888560, OK888561, OK888562, OK888563, OK888564, OK888565, OK888566, OK888567, OK888568, OK888569, OK888570, OK888571, OK888572, OK888573, OK888574, OK888575, OK888576, OK888577, OK888578, OK888579, OK888580, OK888581, OK888582, OK888583, OK888584, OK888585, OK888586, OK888587, OK888588, OK888589, OR037209, OR051684, OR051685, OR051686, OR999319, OR999320, PP001440, PP001441, PP001442, PP001443, PP001444, PP001445, PP001446, OR992670, OR992671, OR992672, OR992673, OR992674, OR992675, OP985508, and OP985509.

[0263] In some aspects, the ITR sequences, e.g., AAV2 ITR sequences or orthologs thereof, are derived from the genome of a parvovirus having a genomic sequence selected from the group consisting of Genbank Acc. No. NC_004290, NC_022564, NC_077029, NC_005041, NC_040626, NC_003346, NC_004287, NC_004288, NC_018399, NC_026943, NC_012685, NC_023842, NC_002190, NC_006555, NC_030296, NC_001899, NC_034532, NC_004286, NC_015718, NC_004284, NC_005341, NC_019492, NC_015115, NC_005040, NC_018450, NC_031450, NC_007218, NC_011545, NC_000936, NC_004289, NC_038532, NC_022748, NC_012636, NC_011317, NC_004285, NC_014357, NC_040843, NC_039043, NC_040562, NC_055465, NC_055527, NC_077031, NC_076028, NC_075989, NC_075985, NC_040671, NC_002077, NC_001729, NC_001829, NC_006260, NC_006261, NC_001401, NC_001662, NC_031751, NC_016752, NC_004828, NC_006263, NC_014468, NC_029300, NC_03904, NC_039047, NC_027429, NC_028973, NC_007455, NC_075120, NC_055583, NC_014358, NC_012564, NC_038537, NC_031959, NC_005889, NC_006152, NC_038898, NC_001540, NC_038895, NC_006259, NC_074970, NC_037053, NC_024888, NC_038539, NC_038535, NC_038536, NC_020499, NC_004442, NC_001539, NC_024452, NC_024454, NC_038534, NC_038543, NC_039050, NC_035186, NC_035185, NC_016744, NC_040652, NC_022800, NC_039044, NC_017823, NC_001701, NC_006147, NC_038533, NC_012042, NC_012729, NC_004295, NC_007018, NC_000883, NC_040533, NC_029797, NC_039048, NC_030873, NC_001510, NC_055485, NC_055486, NC_055487, NC_039045, NC_038547, NC_022089, NC_038883, NC_025965, NC_038542, NC_023673, NC_024453, NC_016031, NC_016032, NC_016647, NC_038538, NC_038546, NC_022104, NC_001718, NC_014665, NC_023020, NC_023860, NC_043446, NC_026815, NC_038544, NC_025825, NC_029133, NC_028650, NC_038545, NC_040672, NC_040603, NC_038541, NC_040623, NC_040694, NC_031695, NC_055518, NC_040695, NC_055458, NC_038540, NC_034445, NC_006148, NC_031670, NC_028136, NC_035180, NC_030402, NC_039049, NC_077138, NC_032097, NC_030837, NC_026251, NC_025891, NC_075119, NC_075986, NC_075988, NC_075998, NC_076001, NC_076133, NC_076185, NC_076293, NC_076473, NC_076995, NC_077009, NC_077010, NC_077011, NC_077012, NC_077013, NC_077032, NC_077033, NC_077037, NC_077098, NC_077099, NC_077112, NC_077148, NC_077156, PP035815, PP035816, PP035817, PP049248, PP058119, OK888554, OK888555, OK888556, OK888557, OK888558, OK888559, OK888560, OK888561, OK888562, OK888563, OK888564, OK888565, OK888566, OK888567, OK888568, OK888569, OK888570, OK888571, OK888572, OK888573, OK888574, OK888575, OK888576, OK888577, OK888578, OK888579, OK888580, OK888581, OK888582, OK888583, OK888584, OK888585, OK888586, OK888587, OK888588, OK888589, OR037209, OR051684, OR051685, OR051686, OR999319, OR999320, PP001440, PP001441, PP001442, PP001443, PP001444, PP001445, PP001446, OR992670, OR992671, OR992672, OR992673, OR992674, OR992675, OP985508, and OP985509.

[0264] The nucleotide sequence encoding a Rep78 or Rep68 protein or ortholog thereof in a genomic sequence disclosed herein can be determined by a person of ordinary skill in the art without undue experimentation. For example, the potential open reading frames identified via a 3-frame translation of the genomic sequence can be scanned for the presence of a Rep_N domain (Interpro IPR014835) alone or combined with a parvovirus NS1 helicase domain (Interpro IPR001257) using the InterproScan tool available at www.ebi.ac.uk/interpro/search/sequence/. Alternatively, the open reading frames can be identified an ORF-calling program such as Prodigal (e.g., version 2.6.3) (Hyatt et al. (2010) BMC Bioinformatics, 11, 119), GLIMMER (e.g., version 3.02) (Delcher et al. (2007) Bioinformatics 23, 673-679), GeneMarkS (e.g., version 4.32) (Besemer et al. (2001) Nucleic Acids Research 27, 3911-3920), PHANOTATE (e.g., version 1.5.0) (McNair et al. (2019) Bioinformatics 35, 4537-4542), Metaprodigal (e.g., version 2.6.3) (Hyatt et al. (2012) Bioinformatics 28, 2223-2230), FragGeneScan (e.g., version 1.31), (Rho et al. (2010) Nucleic Acids Research 38, e191-e191), MetaGeneAnnotator (MGA) (Noguchi et al. (2008) DNA Research 15, 387-396), or AUGUSTUS (e.g., version 3.4.0) (Stanke et al. (2008) Bioinformatics 24, 637-644). The nucleotide sequence of the ITRs in a genomic sequence disclosed herein can be determined by a person of ordinary skill in the art without undue experimentation. For example, since the 3′ ITR is the reverse complement of the 5′ ITR, a subsequence longer than the length of a typical ITR taken from the 5′ end of the parvovirus genome can be aligned with the reverse complement of a subsequence with the same length taken from the 3′ end of the parvovirus genome, and the aligned regions identical or almost identical would identify the position and sequences of the ITRs.

### Other AAV-ITR Vector Components

[0265] Enhancer: In some aspects, the AAV-ITR vector can comprise an enhancer region. In some aspects, the AAV-ITR vector can comprise a CMV enhancer region.

[0266] Promoter: The promoter drives the expression of the AAV transgene, i.e., the polynucleotide encoding a GOI in the AAV-ITR vector. Promoters are upstream or 5′ of the gene they control. Promoters can be organism or tissue type-specific, which can help restrict the expression of the transgene to a specific cell, tissue, or location. Promoters can also drive different levels of expression. For example, CAG is a strong promoter that drives very high, ubiquitous expression, while the human synapsin 1 promoter is neuronal specific (Haery et al., 2019).

[0267] In some aspects, the AAV-ITR vector can comprise a promoter such as, but not limited to, cytomegalovirus (CMV), U6, chicken β-actin (CBA), CAG, ubiquitin C (UBC), β glucuronidase (GUSB), NSE, Synapsin, MeCP2, human elongation factor 1a-subunit (EF 1a), or GFAP promoter. In some aspects, the promoter for an AAV-ITR vector of the present disclosure is a CMV promoter. As another non-limiting example, the promoter for an AAV-ITR vector of the present disclosure is a U6 promoter. In some aspects, the AAV-ITR vector can comprise a CMV and a U6 promoter. In some aspects, the AAV-ITR vector can comprise a HI promoter. In some aspects, the AAV-ITR vector can comprise a CBA promoter. In some aspects, the AAV-ITR vector can comprise a UBC promoter. In some aspects, the AAV-ITR vector can comprise a GUSB promoter. In some aspects, the AAV-ITR vector can comprise a NSE promoter. In some aspects, the AAV-ITR vector can comprise a Synapsin promoter. In some aspects, the AAV-ITR vector can comprise a MeCP2 promoter. In some aspects, the AAV-ITR vector can comprise a GFAP promoter.

[0268] Tissue-specific expression elements can be used to restrict expression to certain cell types such as, but not limited to, muscle specific promoters, B cell promoters, monocyte promoters, leukocyte promoters, macrophage promoters, pancreatic acinar cell promoters, endothelial cell promoters, lung tissue promoters, astrocyte promoters, or nervous system promoters which can be used to restrict expression to neurons, astrocytes, or oligodendrocytes.

[0269] Non-limiting examples of muscle-specific promoters include mammalian muscle creatine kinase (MCK) promoter, mammalian desmin (DES) promoter, mammalian troponin I (TNNI2) promoter, and mammalian skeletal alpha-actin (ASKA) promoter (see, e.g. U.S. Patent Publication US 20110212529, the contents of which are herein incorporated by reference in their entirety). Non-limiting examples of tissue-specific expression elements for neurons include neuron-specific enolase (NSE), platelet-derived growth factor (PDGF), platelet-derived growth factor B-chain (PDGF-β), synapsin (Syn), methyl-CpG binding protein 2 (MeCP2), Ca2+/calmodulin-dependent protein kinase II (CaMKII), metabotropic glutamate receptor 2 (mGluR2), neurofilament light (NFL) or heavy (NFH), β-globin minigene flP2, preproenkephalin (PPE), enkephalin (Enk) and excitatory amino acid transporter 2 (EAAT2) promoters. Non-limiting examples of tissue-specific expression elements for astrocytes include glial fibrillary acidic protein (GFAP) and EAAT2 promoters. A non-limiting example of a tissue-specific expression element for oligodendrocytes includes the myelin basic protein (MBP) promoter.

[0270] In some aspects, the AAV vector comprises a ubiquitous promoter. Non-limiting examples of ubiquitous promoters include, e.g., CMV, CBA (including derivatives CAG, CBh, etc.), EF-la, PGK, UBC, GUSB (hGBp), and UCOE (promoter of HNRPA2B1-CBX3).

[0271] Yu et al. (2011) Molecular Pain 7:63, evaluated the expression of EGFP under the CAG, EFIa, PGK and UBC promoters in rat DRG cells and primary DRG cells using lentiviral vectors and found that UBC showed weaker expression than the other 3 promoters and only 10-12% glial expression was seen for all promoters. Soderblom et al. (2015) E. Neuro 2(2), evaluated the expression of eGFP in AAV 8 with CMV and UBC promoters and AAV2 with the CMV promoter after injection in the motor cortex.

[0272] Intranasal administration of a plasmid containing a UBC or EFIa promoter showed a sustained airway expression greater than the expression with the CMV promoter. See, e.g., Gill et al. (2001) Gene Therapy 8:1539-1546. Husain et al. (2009) Gene Therapy 16(7):927-932, evaluated a HOH construct with a hGUSB promoter, an HSV-ILAT promoter and an NSE promoter and found that the HOH construct showed weaker expression than NSE in mouse brain. Passini and Wolfe (2001) J. Virol. 75:12382-12392, evaluated the long-term effects of the HOH vector following an intraventricular injection in neonatal mice and found that there was sustained expression for at least 1 year. Low expression in all brain regions was found by Xu et al. (2001) Gene Therapy 8:1323-1332, when NFL and NFH promoters were used as compared to the CMV-lacZ, CMV-luc, EF, GFAP, hENK, nAChR, PPE, PPE+wpre, NSE (0.3 kb), NSE (1.8 kb) and NSE (1.8 kb+wpre). Xu et al. found that the promoter activity in descending order was NSE (1.8 kb), EF, NSE (0.3 kb), GFAP, CMV, hENK, PPE, NFL and NFH. NFL is a 650 nucleotide promoter and NFH is a 920 nucleotide promoter which are both absent in the liver but NFH is abundant in the sensory proprioceptive neurons, brain and spinal cord and NFH is present in the heart. Scn8a is a 470 nucleotide promoter which expresses throughout the DRG, spinal cord and brain with particularly high expression seen in the hippocampal neurons and cerebellar Purkinje cells, cortex, thalamus and hypothalamus. See, e.g., Drews et al. (0027) Mamm. Genome 18:723-731; and Raymond et al. (2004) J. Biol. Chem. 279(44) 46234-46241. Any of the promoters taught by the aforementioned Yu, Soderblom, Gill, Husain, Passini, Xu, Drews or Raymond can be used in the present disclosure.

[0273] In some aspects, the promoter is not cell specific. In some aspects, the promoter is an ubiquitin c (UBC) promoter. The UBC promoter can have a size of 300-350 nucleotides. In some aspects, the UBC promoter is 332 nucleotides. In some aspects, the promoter is a 0-glucuronidase (GUSB) promoter. The GUSB promoter can have a size of 350-400 nucleotides. In some aspects, the GUSB promoter is 378 nucleotides. In some aspects, the promoter is a neurofilament light (NFL) promoter. The NFL promoter can have a size of 600-700 nucleotides. In some aspects, the NFL promoter is 650 nucleotides. In some aspects, the promoter is a neurofilament heavy (NFH) promoter. The NFH promoter can have a size of 900-950 nucleotides. In some aspects, the promoter is a scn8a promoter.

[0274] In some aspects, the AAV-ITR vector comprises a Pol III promoter. In some aspects, the AAV vector comprises a PI promoter. In some aspects, the AAV-ITR vector comprises a FXN promoter. In some aspects, the promoter is a phosphoglycerate kinase 1 (PGK) promoter. In some aspects, the promoter is a chicken β-actin (CBA) promoter. In some aspects, the promoter is a CAG promoter which is a construct comprising the cytomegalovirus (CMV) enhancer fused to the chicken beta-actin (CBA) promoter. In some aspects, the promoter is a cytomegalovirus (CMV) promoter. In some aspects, the AAV-ITR vector comprises a HI promoter. In some aspects, the AAV-ITR vector comprises a U6 promoter. In some aspects, the AAV-ITR vector comprises a SP6 promoter.

[0275] In some aspects, the promoter is a liver or a skeletal muscle promoter. Non-limiting examples of liver promoters include human a-1-antitrypsin (hAAT) and thyroxine binding globulin (TBG). Non-limiting examples of skeletal muscle promoters include Desmin, MCK or synthetic C5-12. In some aspects, the promoter is an RNA pol III promoter. In some aspects, the RNA pol III promoter is U6. In some aspects, the RNA pol III promoter is HI. In some aspects, the AAV-ITR vector comprises two promoters. In some aspects, the promoters are an EFla promoter and a CMV promoter.

[0276] Intron: In some aspects, the payload region of an AAV-ITR vector of the present disclosure comprises at least one element to enhance the expression such as one or more introns or portions thereof. Non-limiting examples of introns include, MVM (67-97 bps), FIX truncated intron 1 (300 bps), β-globin SD/immunoglobulin heavy chain splice acceptor (250 bps), adenovirus splice donor/immunoglobin splice acceptor (500 bps), SV40 late splice donor/splice acceptor (19S/16S) (180 bps) and hybrid adenovirus splice donor/IgG splice acceptor (230 bps).

[0277] In some aspects, the intron or intron portion can be between about 100 nucleotides and about 500 nucleotides in length. The intron can have a length of about 80 nucleotides, about 90 nucleotides, about 100 nucleotides, about 110 nucleotides, about 120 nucleotides, about 130 nucleotides, about 140 nucleotides, about 150 nucleotides, about 160 nucleotides, about 170 nucleotides, about 171 nucleotides, about 172 nucleotides, about 173 nucleotides, about 174 nucleotides, about 175 nucleotides, about 176 nucleotides, about 177 nucleotides, about 178 nucleotides, about 179 nucleotides, about 180 nucleotides, about 190 nucleotides, about 200 nucleotides, about 210 nucleotides, about 220 nucleotides, about 230 nucleotides, about 240 nucleotides, about 250 nucleotides, about 260 nucleotides, about 270 nucleotides, about 280 nucleotides, about 290 nucleotides, about 300 nucleotides, about 310 nucleotides, about 320 nucleotides, about 330 nucleotides, about 340 nucleotides, about 350 nucleotides, about 360 nucleotides, about 370 nucleotides, about 380 nucleotides, about 390 nucleotides, about 400 nucleotides, about 410 nucleotides, about 420 nucleotides, about 430 nucleotides, about 440 nucleotides, about 450 nucleotides, about 460 nucleotides, about 470 nucleotides, about 480 nucleotides, about 490 nucleotides, or about 500 nucleotides. The intron can have a length between about 80 and about 100 nucleotides, between about 80 and about 120 nucleotides, between about 80 and about 140 nucleotides, between about 80 and about 160 nucleotides, between about 80 and about 180 nucleotides, between about 80 and about 200 nucleotides, between about 80 and about 250 nucleotides, between about 80 and about 300 nucleotides, between about 80 and about 350 nucleotides, between about 80 and about 400 nucleotides, between about 80 and about 450 nucleotides, between about 80 and about 500 nucleotides, between about 200 and about 300 nucleotides, between about 200 and about 400 nucleotides, between about 200 and about 500 nucleotides, between about 300 and about 400 nucleotides, between about 300 and about 500 nucleotides, or between about 400 and about 500 nucleotides.

[0278] Poly A Signal: In some aspects, the AAV-ITR vectors of the present disclosure comprise at least one polyadenylation signal. The polyadenylation or Poly(A) is the process required for the synthesis of messenger RNA (mRNA) in which an endonucleolytic RNA cleavage is coupled with synthesis of polyadenosine monophosphate (adenine base) on the newly formed 3′ end. The sequence elements for polyadenylation include the polyadenylation signal and the polyadenylation site. In mRNA or cDNA the added stretch of polyadenosine monophosphate is the polyadenylation tail. Most human polyadenylation signals (PolyA signal) contain the conserved motif AATAAA. The polyadenylation signals are located downstream of the 3′ exons. Polyadenylation sites (PolyA sites) are the sites of cleavage at which a polyA tail is added in mRNA. It is localized downstream of the PolyA signal. The sequence at/or immediately 5′ to the site of RNA cleavage is frequently (but not always) CA. The PolyA tail is a stretch of adenosine monophosphate (with only adenine bases) at the 3′ end of mRNA or cDNA. See Wahle et al. (1992) Ann. Rev. Biochem. 61:419-440; and Manley et al. (1996) Science 274:1481-1482, which are herein incorporated by reference in their entireties.

[0279] The terms “polyadenylation sequence” or “polyA sequence” is used interchangeable with the terms polyadenylation tail, and polyA tail. The polyadenylation or polyA tail aids in the nuclear export of RNA and RNA translation, and promotes RNA transcript longevity. Many protein-coding genes have more than one polyadenylation site. See Proudfoot (2011) Genes Dev. 25(17):1770-1782. The AAV vectors of the present disclosure can comprise a polyadenylation sequence between the 3′ end of the payload coding sequence and the 5′ end of the 3′ ITR. In some aspects, the polyA sequence can range from absent to about 500 nucleotides in length. In some aspects, the polyadenylation sequence is between about 50 and about 100 nucleotides, between about 50 and about 150 nucleotides, between about 50 and about 160 nucleotides, between about 50 and about 200 nucleotides, between about 60 and about 100 nucleotides, between about 60 and about 150 nucleotides, between about 60 and about 160 nucleotides, between about 60 and about 200 nucleotides, between about 70 and about 100 nucleotides, between about 70 and about 150 nucleotides, between about 70 and about 160 nucleotides, between about 70 and about 200 nucleotides, between about 80 and about 100 nucleotides, between about 80 and about 150 nucleotides, between about 80 and about 160 nucleotides, between about 80 and about 200 nucleotides, between about 90 and about 100 nucleotides, between about 90 and about 150 nucleotides, between about 90 and about 160 nucleotides, or between about 90 and about 200 nucleotides in length. In some aspects. The AAV-ITR vector of the present disclosure comprises a Tbgh polyA signal, i.e., a bovine growth hormone polyadenylation signal.

### Other Rep Vector Components

[0280] Promoter: In some aspects, the Rep vectors of the present disclosure comprise a promoter. In some aspects, the Rep vectors of the present disclosure comprise a T7 promoter (PT7). The T7 promoter is a sequence of DNA 18 base pairs long up to transcription start site at +1 (5′-taatacgactcactatag-3′) that is recognized by T7 RNA polymerase. The T7 promoter is commonly used to regulate gene expression of recombinant proteins.

[0281] 5′ UTR: By definition, wild-type untranslated regions (UTRs) of a gene are transcribed but not translated. Generally, the 5′ UTR starts at the transcription start site and ends at the start codon and the 3′ UTR starts immediately following the stop codon and continues until the termination signal for transcription. Features typically found in abundantly expressed genes of specific target organs can be engineered into UTRs to enhance transcribed product stability and production. In some aspects, a 5′ UTR from mRNA normally expressed in the liver (e.g., albumin, serum amyloid A, apolipoprotein A/B/E, transferrin, alpha fetoprotein, erythropoietin, or Factor VIII) can be used in AAV vector of the disclosure to enhance expression, e.g., in brain tissue, and specifically in neuronal cells. Wild-type 5′ untranslated regions (UTRs) include features which play roles in translation initiation. Kozak sequences, which are commonly known to be involved in the process by which the ribosome initiates translation of many genes, are usually included in 5′ UTRs. Kozak sequences have the consensus ccr(a/g)ccaugg, where R is a purine (adenine or guanine) three bases upstream of the start codon (ATG), which is followed by another ‘G. In some aspects, the 5′UTR in an AAV vector of the present disclosure includes a Kozak sequence. In some aspects, the 5′UTR in an AAV vector of the present disclosure does not include a Kozak sequence.

[0282] Exemplary 5′-untranslated regions that can be used in the vectors disclosed herein include the 5′ UTR of SEQ ID NOS: 388 to 405. Variants of 5′ UTRs of SEQ ID NOS: 388 to 405 can be utilized wherein one or more nucleotides are added or removed to the termini, including A, T, C or G.

[0283] 3′ UTR: Wild-type 3′ UTRs are known to have stretches of Adenosines and Uridines embedded therein. These AU rich signatures are particularly prevalent in genes with high rates of turnover. Based on their sequence features and functional properties, the AU rich elements (AREs) can be separated into three classes (Chen et al, 1995, the contents of which are herein incorporated by reference in its entirety). Class I AREs, such as, but not limited to, c-Myc and MyoD, contain several dispersed copies of an AUUUA motif within U-rich regions. Class II AREs, such as, but not limited to, GM-CSF and TNF-α, possess two or more overlapping uuauuua(u/a)(u/a) nonamers. Class III ARES, such as, but not limited to, c-Jun and Myogenin, are less well defined. These U rich regions do not contain an AUUUA motif. Most proteins binding to the AREs are known to destabilize the messenger, whereas members of the ELAV family, most notably HuR, have been documented to increase the stability of mRNA. HuR binds to AREs of all the three classes. Engineering the HuR specific binding sites into the 3′ UTR of nucleic acid molecules will lead to HuR binding and thus, stabilization of the message in vivo.

[0284] Shown in the table below is a listing of 3′-untranslated regions that can be used in the vectors disclosed herein. Variants of 3′ UTRs can be utilized wherein one or more nucleotides are added or removed to the termini, including A, T, C or G.

TABLE 6
Exemplary 3′-Untranslated Regions

| Name/ Description | SEQ ID NO. |
|---|---|
| Creatine Kinase | 406 |
| Myoglobin | 407 |
| α-actin | 408 |
| Albumin | 409 |
| α-globin | 410 |
| G-CSF | 411 |
| Col1a2; collagen, type I, alpha 2 | 412 |
| Col6a2; collagen, type VI, alpha 2 | 413 |
| RPN1; ribophorin I | 414 |
| LRP1; low density lipoprotein receptor-related protein 1 | 415 |
| Nnt1; cardiotrophin-like cytokine factor 1 | 416 |
| Col6a1; collagen, type VI, alpha 1 | 417 |
| Calr; calreticulin | 418 |
| Col1a1; collagen, type I, alpha 1 | 419 |
| Plod1; procollagen-lysine, 2-oxoglutarate 5-dioxygenase | 420 |
| 1 | |
| Nucb1; nucleobindin 1 | 421 |
| α-globin (short) | 422 |
| α-globin | 423 |
| (long) | |

[0285] Poly A Tail: In some aspects, a Rep vector comprises a poly A tail. During RNA processing, a long chain of adenine nucleotides (poly-A tail) can be added to a polynucleotide such as an mRNA molecule in order to increase stability. Immediately after transcription, the 3′ end of the transcript can be cleaved to free a 3′ hydroxyl. Then poly-A polymerase adds a chain of adenine nucleotides to the RNA. The process, called polyadenylation, adds a poly-A tail that can be between, for example, about 80 to about 250 nucleotides long, including about 80, about 90, about 100, about 110, about 120, about 130, about 140, about 150, about 160, about 170, about 180, about 190, about 200, about 210, about 220, about 230, about 240 or about 250 nucleotides long. In some aspects, the poly A tail includes terminal groups incorporated for stabilization. In some aspects, the poly A can include a des-3′ hydroxyl tail. The poly A tail can also include structural moieties or 2′-Omethyl modifications as taught by Junjie Li, et al. (Current Biology, Vol. 15, 1501-1507, Aug. 23, 2005, the contents of which are incorporated herein by reference in its entirety).

[0286] The polynucleotides of the present invention can be designed to encode transcripts with alternative poly A tail structures including a histone mRNA tail. According to Norbury, “Terminal uridylation has also been detected on human replication-dependent histone mRNAs. The turnover of these mRNAs is thought to be important for the prevention of potentially toxic histone accumulation following the completion or inhibition of chromosomal DNA replication. These mRNAs are distinguished by their lack of a 3′ poly(A) tail, the function of which is instead assumed by a stable stem-loop structure and its cognate stem-loop binding protein (SLBP); the latter carries out the same functions as those of PABP on polyadenylated mRNAs” (Norbury, “Cytoplasmic RNA: a case of the tail wagging the dog,” Nature Reviews Molecular Cell Biology; AOP, published online 29 Aug. 2013; doi:10.1038/nrm3645) the contents of which are incorporated herein by reference in its entirety.

[0287] Unique poly-A tail lengths can provide certain advantages to the vector of the present disclosure. Generally, the length of a poly-A tail, when present, is greater than 30 nucleotides in length. In another embodiment, the poly-A tail is greater than 35 nucleotides in length (e.g., at least or greater than about 35, 40, 45, 50, 55, 60, 70, 80, 90, 100, 120, 140, 160, 180, 200, 250, 300, 350, 400, 450, 500, 600, 700, 800, 900, 1,000, 1,100, 1,200, 1,300, 1,400, 1,500, 1,600, 1,700, 1,800, 1,900, 2,000, 2,500, and 3,000 nucleotides).

[0288] In some aspects, the poly-A tail is designed relative to the length of the overall vector or the length of a particular region of the vector, e.g., an ORF encoding a gene of interest. This design can be based on the length of a coding region, the length of a particular feature or region or based on the length of the ultimate product expressed from the polynucleotides.

[0289] In this context, the poly-A tail can be 10, 20, 30, 40, 50, 60, 70, 80, 90, or 100% greater in length than the polynucleotide or feature thereof. The poly-A tail can also be designed as a fraction of the polynucleotides to which it belongs. In this context, the poly-A tail can be 10, 20, 30, 40, 50, 60, 70, 80, or 90% or more of the total length of the construct, a construct region or the total length of the construct minus the poly-A tail. Further, engineered binding sites and conjugation of polynucleotides for Poly-A binding protein can enhance expression. Additionally, multiple distinct polynucleotides can be linked together via the PABP (Poly-A binding protein) through the 3′-end using modified nucleotides at the 3′-terminus of the poly-A tail.

[0290] In some aspects, the polynucleotides of the present invention are designed to include a polyA-G Quartet region. The G-quartet is a cyclic hydrogen bonded array of four guanine nucleotides that can be formed by G-rich sequences in both DNA and RNA. In this aspect, the G-quartet is incorporated at the end of the poly-A tail. The resultant polynucleotide is assayed for stability, protein production and other parameters including half-life at various time points. The polyA-G quartet results in protein production from an mRNA equivalent to at least 75% of that seen using a poly-A tail of 120 nucleotides alone.

### Lipidic Delivery Systems and Polymeric Delivery Systems

[0291] In some aspects, the transfection and/or targeting of the AAV-ITR vector and/or Rep vector components of an AAV-ITR based gene delivery system of the present disclosure is mediated by a delivery system such as a lipidic delivery system (e.g., a liposome, a lipid nanoparticle, or a combination thereof) or a polymeric delivery system, or a combination thereof.

[0292] In a specific aspect, the AAV-ITR vector and Rep vector components of an AAV-ITR based gene delivery system of the present disclosure are encapsulated in liposomes. In some aspects, the AAV-ITR vector is encapsulated in a liposome optimized for delivery of dsDNA. In some aspects, the Rep vector is encapsulated in a liposome optimized for delivery of mRNA.

### Lipidic Delivery Systems: Liposomes and Lipid Nanoparticles

[0293] Physicochemical properties of lipids such as biocompatibility, low susceptibility to erosion phenomena, and slow water uptake make lipids an ideal nanocarrier system to improve active pharmaceutical ingredient aqueous solubility, bioavailability, and effective therapy. In addition, lipid-based systems improve storage and delivery while inhibiting oxidation, degradation, and decomposition. See Rawat et al. (2006) Biol. Pharm. Bull. 29: 1790-1798. Unlike other delivery systems, lipid-based drug delivery systems exhibit a major advantage over other methods due to their ability to cross the gut, gastro-intestinal tract (GIT), blood vessels, and blood brain barrier. See Patel et al. (2021) Eur. J. Lipid Sci. Technol. 2021, 123, 2000264, and Muller et al. (2002) Adv. Drug Deliv. Rev. 54: S131-S155. Some lipid-based drug delivery systems include self-emulsifying systems, LNPs, nanostructured lipid carriers (NLCs), and liposomes. See Salawi (2022) Drug Deliv. 29, 1811-1823; Mishra et al. (2021) Expert Opin. Drug Deliv. 18, 315-332; Khairnar et al. (2022) Pharmaceutics 14, 1886; Mirchandani et al. (2021) J. Control. Release 335, 457-464; Izza et al. (2022) ACS Appl. Nano Mater. 5, 9958-9969; Wang et al. (2022) AAPS PharmSciTech 23, 27; Sharma et al. (2021) Mater. Today Proc. 45, 2963-2966; and Hwang et al. (2016) RSC Adv. 6, 70592-70615, which are herein incorporated by reference in their entireties.

[0294] As used herein, the term “lipid” refers to a group of organic compounds that include, but are not limited to, esters of fatty acids and are characterized by being insoluble in water, but soluble in many organic solvents. Lipids are usually divided into at least three classes: (1) “simple lipids,” which include fats and oils as well as waxes; (2) “compound lipids,” which include phospholipids and glycolipids; and (3) “derived lipids” such as steroids. The selection of the individual lipid components of the lipid formulation is made to optimize delivery of a payload (e.g., a nucleic acid) to a target cell. As used herein, the phrase “lipid formulation” refers to a formulation comprising one or more lipids (e.g., cationic lipids, non-cationic lipids, lipid conjugates, and the like).

[0295] Liposomes: In some aspects, the AAV-ITR vector and/or the Rep vector are encapsulated in a liposome or combination thereof. The term “liposome” as used herein refers to a vesicle comprising a lipid bilayer, for example, a closed vesicle formed when amphipathic lipids (e.g., phospholipids or their derivatives) are dispersed in water. The liposomes of the present invention typically comprise one or more phospholipids, and can also contain mixed lipid chains with surfactant properties (e.g., egg phosphatidylethanolamine). Liposome can employ surface ligands to target binding to a specific tissue (e.g., healthy or diseased tissue such tumors or neoplastic cells) or cell. Liposomes typically have an aqueous core. Liposomes are spherical vesicles, typically comprising phospholipids, that have an internal aqueous volume that is enclosed by one or more concentric lipid bilayers with the polar head groups oriented towards the interior and exterior aqueous phases. Natural phospholipids are biocompatible and biodegradable as they are naturally occurring in the body and are a major constituent of cell membranes. Liposomes can act as carriers by entrapping biologically active molecules (e.g., small molecule drugs, polypeptides or polynucleotides) in the aqueous core and/or within the lipid bilayers. Liposomes range in size and can exist as unilamellar or multilamellar vesicles.

[0296] The term “bilayer” as used herein refers to a structure composed of amphiphilic lipid molecules (often phospholipids) arranged in two molecular layers, with the hydrophobic tails on the interior and the polar head groups on the exterior surfaces.

[0297] The terms “liposomal composition” and “liposome-containing composition” are used interchangeably herein and refer to liposome formulations or mixtures comprising lipids (e.g., phospholipids, hydrophilic polymer-derivatized lipids, sterol components such as cholesterols, and combinations thereof). A liposomal composition typically comprises an aqueous solution comprising the liposomes. Encapsulated aqueous solution is aqueous solution in the aqueous core of the liposomes. Non-encapsulated aqueous solution is aqueous solution in which the liposomes are dispersed.

[0298] Liposomes are categorized based on diameter range, number of internalized vesicles, and number of lamellas. Lipid vesicles can be prepared as a small unilammelar vesicles (SUVs) which are created by a bilayer membrane. Large unilammelar vesicles (LUVs) with approximately 20-100 nm diameter range benefit from a bilayer membrane, while double bilayer vesicles (DBVs) contain two bilayer membranes with above 300 nm diameter range. Oligolammelar vesicles (OLVs) contain 3-5 bilayers, while multilammelar vesicles (MLVs) contain more than five concentric bilayer vesicles. There are giant unilammelar vesicles (GUVs) which are generated by a bilayer, as well. Multivesicular vesicles (MVVs) include a bilayer liposome which encapsulates numerous small non-concentric vesicles. Nanoliposomes or sub-micron lipid vesicles are found as SUV, LUV, DBV, and OLV, while MVV, GUV, MLV, OLV, DBV, and LUV are regarded as liposomes

[0299] There are numerous methods to create liposomes including reverse-phase evaporation (RPE), thin film dispersion (TFD), spray-freeze-drying, and alcohol injection. Other methods involve pro-liposomal formulation applying a cryoprotectant and high-temperature procedure, as well as supercritical fluid of carbon dioxide (SCF-CO2) techniques to adjust the experimental pressure and temperature as a method to control the shape and size of the particles.

[0300] Generally, liposomes include closed phospholipid double layers and benefit from a hydrophilic core unlike micelles. Liposomes can carry amphiphilic, hydrophobic, and hydrophilic compounds. In other words, the polar substance is loaded into the hydrophilic core, while the hydrophobic compounds can be placed inside the bilayers of lipid domains.

[0301] The formation of liposomes can depend on the physicochemical characteristics such as, but not limited to, the pharmaceutical formulation entrapped and the liposomal ingredients, the nature of the medium in which the lipid vesicles are dispersed, the effective concentration of the entrapped substance and its potential toxicity, any additional processes involved during the application and/or delivery of the vesicles, the optimization size, polydispersity and the shelf-life of the vesicles for the intended application, and the batch-to-batch reproducibility and possibility of large-scale production of safe and efficient liposomal products.

[0302] As a non-limiting example, liposomes such as synthetic membrane vesicles can be prepared by the methods, apparatus and devices described in U.S. Patent Publication Nos. US20130177638, US20130177637, US20130177636, US20130177635, US20130177634, US20130177633, US20130183375, US20130183373, and US20130183372, the contents of which are herein incorporated by reference in their entireties.

[0303] In one aspect, liposomes disclosed herein can comprise 1,2-dioleyloxy-N,N-dimethylaminopropane (DODMA), 1,2-dilinoleyloxy-3-dimethylaminopropane (DLin-DMA), 2,2-dilinoleyl-4-(2-dimethylaminoethyl)-[1,3]-dioxolane (DLin-KC2-DMA), MC3 (see US20100324120, which is herein incorporated by reference in its entirety), DOTMA, 1,2-dioleoyl-sn-3-phosphoethanolamine (DOPE), N-(14(2,3-dioleyloxy)propyl)-N-(2-(sperminecarboxamido)ethyl)-N,N-dimethylammonium trifluoroacetate (DOSPA), dioctadecylamidoglycyl carboxyspermine (DOGS), and combinations thereof.

[0304] In one aspects, liposomes disclosed herein include those formed from the synthesis of stabilized plasmid-lipid particles (SPLP) or stabilized nucleic acid lipid particle (SNALP) that have been previously described and shown to be suitable for oligonucleotide delivery in vitro and in vivo (see Wheeler et al. Gene Therapy. 1999 6:271-281; Zhang et al. Gene Therapy. 1999 6:1438-1447; Jeffs et al. Pharm Res. 2005 22:362-372; Morrissey et al., Nat Biotechnol. 2005 2:1002-1007; Zimmermann et al., Nature. 2006 441:111-114; Heyes et al. J Contr Rel. 2005 107:276-287; Semple et al. Nature Biotech. 2010 28:172-176; Judge et al. J Clin Invest. 2009 119:661-673; deFougerolles Hum Gene Ther. 2008 19:125-132; U.S. Patent Publication No US20130122104; all of which are incorporated herein in their entireties).

[0305] The original manufacture method by Wheeler et al. was a detergent dialysis method, which was later improved by Jeffs et al. and is referred to as the spontaneous vesicle formation method. The liposome formulations are composed of 3 to 4 lipid components in addition to the polynucleotide. As an example a liposome can contain, but is not limited to, 55% cholesterol, 20% disteroylphosphatidyl choline (DSPC), 10% PEG-S-DSG, and 15% 1,2-dioleyloxy-N,N-dimethylaminopropane (DODMA), as described by Jeffs et al. As another example, certain liposome formulations can contain, but are not limited to, 48% cholesterol, 20% DSPC, 2% PEG-c-DMA, and 30% cationic lipid, where the cationic lipid can be 1,2-distearloxy-N,N-dimethylaminopropane (DSDMA), DODMA, DLin-DMA, or 1,2-dilinolenyloxy-3-dimethylaminopropane (DLenDMA), as described by Heyes et al.

[0306] In some aspects, liposome formulations can comprise from about 25.0% cholesterol to about 40.0% cholesterol, from about 30.0% cholesterol to about 45.0% cholesterol, from about 35.0% cholesterol to about 50.0% cholesterol and/or from about 48.5% cholesterol to about 60% cholesterol. For example, formulations can comprise a percentage of cholesterol selected from the group consisting of 28.5%, 31.5%, 33.5%, 36.5%, 37.0%, 38.5%, 39.0% and 43.5%. In some embodiments, formulations can comprise from about 5.0% to about 10.0% DSPC and/or from about 7.0% to about 15.0% DSPC.

[0307] In one aspect, polynucleotides such as the AAV-ITR vector and/or Rep vector disclosed herein can be encapsulated by the liposome and/or it can be contained in an aqueous core that can then be encapsulated by the liposome (see International Pub. Nos. WO2012031046, WO2012031043, WO2012030901 and WO2012006378 and US Patent Publication Nos. US20130189351, US20130195969 and US20130202684; the contents of each of which are herein incorporated by reference in their entirety).

[0308] In another aspect, liposomes can be formulated for targeted delivery. As a non-limiting example, the liposome can be formulated for targeted delivery to the liver or to the muscle. The liposome used for targeted delivery can include, but is not limited to, the liposomes described in and methods of making liposomes described in US Patent Publication No. US20130195967, the contents of which are herein incorporated by reference in its entirety.

[0309] In another aspect, the polynucleotides (e.g., an AAV-ITR vector and/or Rep vector disclosed herein) can be formulated in a cationic oil-in-water emulsion where the emulsion particle comprises an oil core and a cationic lipid that can interact with the polynucleotide anchoring the molecule to the emulsion particle (see International Pub. No. WO2012006380; herein incorporated by reference in its entirety).

[0310] In one aspects, the polynucleotides (e.g., an AAV-ITR vector and/or Rep vector disclosed herein) can formulated in a water-in-oil emulsion comprising a continuous hydrophobic phase in which the hydrophilic phase is dispersed. As a non-limiting example, the emulsion can be made by the methods described in International Publication No. WO201087791, the contents of which are herein incorporated by reference in its entirety.

[0311] In another aspect, the liposome can include at least cationic lipid, a lipid that can enhance transfection and a least one lipid that contains a hydrophilic head group linked to a lipid moiety (International Pub. No. WO2011076807 and U.S. Pub. No. 20110200582; the contents of each of which is herein incorporated by reference in their entirety). In another aspect, the liposome can have crosslinks between functionalized lipid bilayers (see U.S. Pub. No. 20120177724, the contents of which is herein incorporated by reference in its entirety).

[0312] In one aspect, the liposome is a liposome described in International Patent Publication No. WO2013086526, the contents of which is herein incorporated by reference in its entirety.

[0313] In some aspects, the AAV-ITR and/or Rep vector be encapsulated in a liposome using reverse pH gradients and/or optimized internal buffer compositions as described in International Patent Publication No. WO2013086526, the contents of which is herein incorporated by reference in its entirety. In some aspects embodiment, the liposome comprises a cationic lipid. In some aspects, the liposome can have a molar ratio of nitrogen atoms in the cationic lipid to the phosphates in the RNA (N:P ratio) of between 1:1 and 20:1 as described in International Publication No. WO2013006825, herein incorporated by reference in its entirety. In another embodiment, the liposome can have a N:P ratio of greater than 20:1 or less than 1:1.

[0314] The liposome formulation can be influenced by, but not limited to, the selection of the cationic lipid component, the degree of cationic lipid saturation, the nature of the PEGylation, ratio of all components and biophysical parameters such as size. In one example by Semple et al. (Semple et al. Nature Biotech. 2010 28:172-176; herein incorporated by reference in its entirety), the liposome formulation was composed of 57.1% cationic lipid, 7.1% dipalmitoylphosphatidylcholine, 34.3% cholesterol, and 1.4% PEG-c-DMA. As another example, changing the composition of the cationic lipid can more effectively deliver siRNA to various antigen-presenting cells (Basha et al. Mol Ther. 2011 19:2186-2200; herein incorporated by reference in its entirety). In some aspects, liposome formulations can comprise from about 35 to about 45% cationic lipid, from about 40% to about 50% cationic lipid, from about 50% to about 60% cationic lipid and/or from about 55% to about 65% cationic lipid. In some aspects, the ratio of lipid to dsDNA or mRNA in liposomes can be from about 5:1 to about 20:1, from about 10:1 to about 25:1, from about 15:1 to about 30:1 and/or at least 30:1.

[0315] Lipid Nanoparticles (LNP): In some aspects, the AAV-ITR vector and/or the Rep vector are encapsulated in a LNP or combination thereof. As used herein, the term “lipid nanoparticle” is used interchangeably with the abbreviation “LNP” and refers to a microscopic lipid formulation that can be used to deliver an active agent or therapeutic agent, such as a nucleic acid (e.g., an mRNA, dsDNA), to a target site of interest (e.g., an immune cell). Lipid nanoparticles typically have a size of less than about 1000 nm in at least one dimension. In various aspects, the LNPs of the present disclosure have a mean diameter of from about 30 nm to about 150 nm, from about 40 nm to about 150 nm, from about 50 nm to about 150 nm, from about 60 nm to about 130 nm, from about 70 nm to about 110 nm, from about 70 nm to about 100 nm, from about 80 nm to about 100 nm, from about 90 nm to about 100 nm, from about 70 to about 90 nm, from about 80 nm to about 90 nm, from about 70 nm to about 80 nm, or about 30 nm, 35 nm, 40 nm, 45 nm, 50 nm, 55 nm, 60 nm, 65 nm, 70 nm, 75 nm, 80 nm, 85 nm, 90 nm, 95 nm, 100 nm, 105 nm, 110 nm, 115 nm, 120 nm, 125 nm, 130 nm, 135 nm, 140 nm, 145 nm, or 150 nm.

[0316] Components suitable for the generation of lipidic delivery systems such as liposomes or lipid nanoparticles are discussed in detail below.

### Components of Lipidic Delivery Systems: Cationic or Ionizable Lipids or Lipidoids

[0317] As used herein, the term “ionizable lipid” refers to any of a number of lipid species that carry a net positive charge at a selected pH, such as physiological pH 4 and a neutral charge at other pHs such as physiological pH 7. Ionizable lipids can be used as a component of a lipidic delivery systems of the present disclosure (ego, a liposome or a LNP) to facilitate or enhance the delivery and release of a nucleic acid, e.g., a dsDNA in the case of an AAV-ITR vector or an mRNA in the case of a Rep vector, to one or more target cells (e.g., by permeating or fusing with the lipid membranes of such target cells).

[0318] In some specific aspects, the ionizable lipid or lipidoid is cKK-E12 (3,6-bis(4-(bis(2-hydroxydodecyl)amino)butyl)piperazine-2,5-dione). In some specific aspects, the ionizable lipid or lipidoid is Lipid 10, disclosed in WO2018087753, which is herein incorporated by reference in its entirety. In some aspects, the ionizable lipid or lipidoid is selected from the group consisting of cKK-E12, ALC-0315, SM-102, YK-009, DLin-MC3-DMA, KC2, A6, OF-02, A18-Iso5-2DC18, 98N12-5, 9A1p9, C12-200, 7C1, G0-C14, L319, 304O13, OF-Deg-Lin, 306-O12B, 3060i10, FTT5, Lipid 10, and combinations thereof.

[0319] cKK-E12 is an ionizable cationic lipomer that has been used in combination with other lipids in the formation of LNPs for the delivery of mRNA. ALC-0315 is an ionizable lipid that has been used to form lipid nanoparticles for delivery of RNA. ALC-0315 is one of the components in the BNT162b2 vaccine against SARS-CoV-2 in addition to ALC-0159, DSPC, and cholesterol. SM-102 is a synthetic amino lipid that is generally used in combination with other lipids to form LNPs. cKK-E12, ALC-0315, and SM-102 are used for the delivery of mRNA-based vaccines, and in particular SM-102 forms part of the drug delivery system for the Moderna COVID-19 vaccine. In the context of the present disclosure, cKK-E12, ALC-0315, SM-102, and Lipid 10 can be used as suitable lipids for the delivery of dsDNAS (e.g., an AAV-ITR vector) or an mRNA (e.g., a Rep vector) to one or more target cells.

[0320] In certain aspects, an ionizable lipid comprises one or more cleavable functional groups (e.g., a disulfide) that allow, for example, a hydrophilic functional head-group to dissociate from a lipophilic functional tail-group of the compound (e.g., upon exposure to oxidative, reducing or acidic conditions), thereby facilitating a phase transition in the lipid bilayer of the one or more target cells. In some embodiments, an ionizable lipid is a lipid as represented by formula 1 or as listed in Tables 1 or 2 of U.S. Pat. No. 9,708,628, the content of which is herein incorporated by reference in its entirety. In some embodiments, an ionizable lipid is as described in pages 7-13 of U.S. Pat. No. 9,765,022 or as represented by formula 1 of U.S. Pat. No. 9,765,022, the content of which is herein incorporated by reference in its entirety. In some embodiments, an ionizable lipid is described in pages 12-24 of WO2019152848A1 or as represented by formula 1 of International Patent Application WO2019152848A1, the contents of which are herein incorporated by reference in their entirety.

[0321] As used herein, the term “cationic lipid” refers to a lipid that is cationic or becomes cationic (protonated) as the pH is lowered below the pK of the ionizable group of the lipid, but is progressively more neutral at higher pH values. At pH values below the pK, the lipid is then able to associate with negatively charged nucleic acids. In certain embodiments, the cationic lipid comprises a zwitterionic lipid that assumes a positive charge on pH decrease.

[0322] In some aspects, the cationic lipid is DOTAP or DOTMA. In some aspects, the cationic lipid comprises any of a number of lipid species that carry a net positive charge at a selective pH, such as physiological pH. Such lipids include, but are not limited to, N,N-dioleyl-N,N-dimethylammonium chloride (DODAC); N-(2,3-dioleyloxy)propyl)-N,N,N-trimethylammonium chloride (DOTMA); N,N-distearyl-N,N-dimethylammonium bromide (DDAB); N-(2,3-dioleoyloxy)propyl)-N,N,N-trimethylammonium chloride (DOTAP); 3-(N—(N′,N′-dimethylaminoethane)-carbamoyl)cholesterol (DC-Chol), N-(1-(2,3-dioleoyloxy)propyl)-N-2-(sperminecarboxamido)ethyl)-N,N-dimethylammonium trifluoracetate (DOSPA), dioctadecylamidoglycyl carboxyspermine (DOGS), 1,2-dioleoyl-3-dimethylammonium propane (DODAP), N,N-dimethyl-2,3-dioleoyloxy)propylamine (DODMA), and N-(1,2-dimyristyloxyprop-3-yl)-N,N-dimethyl-N-hydroxyethyl ammonium bromide (DMRIE).

[0323] Additionally, a number of commercial preparations of cationic lipids are available which can be used in the LNP of the present disclosure. These include, for example, LIPOFECTIN® (commercially available cationic liposomes comprising DOTMA and 1,2-dioleoyl-sn-3-phosphoethanolamine (DOPE), from GIBCO/BRL, Grand Island, N.Y.); LIPOFECTAMINE® (commercially available cationic liposomes comprising N-(14(2,3-dioleyloxy)propyl)-N-(2-(sperminecarboxamido)ethyl)-N,N-dimethylammonium trifluoroacetate (DOSPA) and (DOPE), from GIBCO/BRL); and TRANSFECTAM® (commercially available cationic lipids comprising dioctadecylamidoglycyl carboxyspermine (DOGS) in ethanol from Promega Corp., Madison, Wis.).

[0324] The following lipids are cationic and have a positive charge at below physiological pH: DODAP, DODMA, DMDMA, 1,2-dilinoleyloxy-N,N-dimethylaminopropane (DLinDMA), and 1,2-dilinolenyloxy-N,N-dimethylaminopropane (DLenDMA).

[0325] In some aspects, the cationic lipid is an amino lipid. Suitable amino lipids useful in the lipidic delivery systems of the present disclosure (e.g., a LNP, a liposome, or a combination thereof) include those described in WO 2012/016184, incorporated herein by reference in its entirety. Representative amino lipids include, but are not limited to, 1,2-dilinoleyoxy-3-(dimethylamino)acetoxypropane (DLin-DAC), 1,2-dilinoleyoxy-3-morpholinopropane (DLin-MA), 1,2-dilinoleoyl-3-dimethylaminopropane (DLinDAP), 1,2-dilinoleylthio-3-dimethylaminopropane (DLin-S-DMA), I-linoleoyl-2-linoleyloxy-3-dimethylaminopropane (DLin-2-DMAP), 1,2-dilinoleyloxy-3-trimethylaminopropane chloride salt (DLin-TMA·Cl), 1,2-dilinoleoyl-3-trimethylaminopropane chloride salt 30 (DLin-TAP·Cl), 1,2-dilinoleyloxy-3-(N-methylpiperazino)propane (DLin-MPZ), 3-(N,N-dilinoleylamino)-1,2-propanediol (DLinAP), 3-(N,N-dioleylamino)-1,2-propanediol (DOAP), 1,2-dilinoleyloxo-3-(2-N,N-dimethylamino)ethoxypropane (DLin-EG-DMA), and 2,2-dilinoleyl-4-dimethylaminomethyl-[1,3]-dioxolane (DLin-K-DMA).

[0326] In some aspects, the cationic or ionizable lipid or lipidoid component in a lipidic delivery system of the present disclosure (e.g., a LNP, a liposome, or a combination thereof) can comprise an ionizable cationic lipid, an ionizable cationic amino lipid, an ionizable cationic lipidoid, a polyamine branched-chain lipidoid, a lipid catechol, an ionizable dendrimer, a branched-chain ionizable cationic lipidoid, an ionizable cationic trialkyl lipid, a biodegradable alkyne lipid, an ionizable cationic SSPalm, an ionizable cationic self-degradable SSPalm, a multi-tail ionizable cationic phospholipid or a combination thereof.

[0327] Cationic ionizable that can be use in the lipidic delivery systems of the present disclosure comprise 1,2(R)-Dioleyloxy-3-dimethylamino-propane (Cayman Chemical Item 8004302; CAS No. 666234-78-2, also known as R-DODMA), Lipid R6 (Cayman Chemical Item No. 39130), 3060i9-cis2 (Cayman Chemical Item No. 39557), Lipid 16 (Cayman Chemical Item No. 38861), Lipid AX4 (Cayman Chemical Item No. 39070, CAS No. 2735814-23-8), RM 137-15 (Cayman Chemical Item No. 38918), C12-113 (Cayman Chemical Item No. 39335; CAS No. 1220890-27-6), C12-SPM (Cayman Chemical Item No. 38784, CAS No. 2055647-81-7, also known as C12-spermine), Lipid 10 (Cayman Chemical Item No. 38705, CAS No. 2430034-02-7, also known as EA-PIP), RM 133-3 (Cayman Chemical Item No. 38917, CAS No. 2941228-90-4), AA-T3A-C12 (Cayman Chemical Item No. 38648), Lipid 23 (Cayman Chemical Item No. 38862), OC2-K3-E10 (Cayman Chemical Item No. 38243, also known as I-28), CL4F8-6 (Cayman Chemical Item No. 38802, CAS No. 2766493-12-1), Lipid Catechol (Cayman Chemical Item No. 38665), 1014 (Cayman Chemical Item No. 38150), Lipid III-45 (Cayman Chemical Item No. 39243, CAS No. 2096984-25-5, also known as Cationic Lipid A), Lipid 8 (Cayman Chemical Item No. 38746, CAS No. 2226547-25-5), RCB-4-8 (Cayman Chemical Item No. 38803, CAS No. 2941228-91-5), YK-009 (Cayman Chemical Item No. 38282, CAS No. 2761458-86-8), 4A3-SC8 (Cayman Chemical Item No. 38155, CAS No. 1857340-78-3), Lipid 2,2(8,8) 4C CH3 (Cayman Chemical Item No. 37910, CAS No. 2230647-30-8, also known as ATX-0114), ATX-001 (Cayman Chemical Item No. 39037, CAS No. 1777792-33-2), ALC-0315 analogous-1 (Cayman Chemical Item No. 38591, CAS No. 2430034-17-4), C14-SPM (Cayman Chemical Item No. 38785, CAS No. 2241864-59-3, also known as C14-spermine), Lipid 222 (Cayman Chemical Item No. 38338), Lipid A4 (Cayman Chemical Item No. 38351, CAS No. 2639634-71-0), C14-4 (Cayman Chemical Item No. 38942, CAS No. 2639634-80-1), A12-Iso5-2DC18 (Cayman Chemical Item No. 38586, CAS No. 2412492-06-7), 1,2-Dipalmitoyl-3-dimethylammonium-propane (Cayman Chemical Item No. 38311, CAS No. 96326-74-8, also known as 16:0 DAP or DPDAP), 1,2-Dimyristoyl-3-dimethylammonium-propane (Cayman Chemical Item No. 38310, CAS No. 72719-84-7, also known as 14:0 DAP or DMDAP), Lipid CL1 (Cayman Chemical Item No. 38320, CAS No. 1450888-71-7), L202 (Cayman Chemical Item No. 37841, CAS No. 2170488-92-1), C13-112-tetra-tail (Cayman Chemical Item No. 38329, CAS No. 1381861-92-2), Lipid 14 (Cayman Chemical Item No. 38589, CAS No. 2430034-05-0), OF-Deg-Lin (Cayman Chemical Item No. 37853, CAS No. 1853202-95-5), DOG-IM4 (Cayman Chemical Item No. 37441, CAS No. 2758097-38-8), AL-A12 (Cayman Chemical Item No. 38001), 98N12-5 (Cayman Chemical Item No. 37651, CAS No. 917572-74-8, also known as ND98), TT3 (Cayman Chemical Item No. 37909, CAS No. 1821214-50-9), 246C10 (Cayman Chemical Item No. 37907, CAS No. 2635329-26-7), OF-C4-Deg-Lin (Cayman Chemical Item No. 37856, CAS No. 1853203-01-6), Lipid A6 (Cayman Chemical Item No. 35052), IC8 (Cayman Chemical Item No. 37986, CAS No. 2349307-32-8), PPZ-A10 (Cayman Chemical Item No. 9004144), AA3-DLin (Cayman Chemical Item No. 37903), BAMEA-016B (Cayman Chemical Item No. 37439, CAS No. 2490668-30-7, also known as BAMPA-016B), 113-016B (Cayman Chemical Item No. 37831, CAS No. 2566523-07-5), SSPalmO-Phe (Cayman Chemical Item No. 37670, CAS No. 2377474-67-2), SSPalmM (Cayman Chemical Item No. 37377, CAS No. 1436860-60-4), Lipid A9 (Cayman Chemical Item No. 37667, CAS No. 2036272-50-9), OF-02 (Cayman Chemical Item No. 37652, CAS No. 1883431-67-1), 113-O12B (Cayman Chemical Item No. 37671, CAS No. 2803699-72-9), ATX-100 (Cayman Chemical Item No. 36935, CAS No. 2230647-37-5), CL4H6 (Cayman Chemical Item No. 37279, CAS No. 2256087-35-9), 9A1P9 (Cayman Chemical Item No. 37276, CAS No. 2760467-57-8), 80-016B (Cayman Chemical Item No. 37564, CAS No. 1624618-02-5), CIN-16645 (Cayman Chemical Item No. 37278, CAS No. 1799316-64-5, also known as LP-01), 306-O12B (Cayman Chemical Item No. 37549, CAS No. 2566523-06-4), 306-O12B-3 (Cayman Chemical Item No. 37096), Lipid C24 (Cayman Chemical Item No. 37122, CAS No. 2767561-52-2), cKK-E12 (Cayman Chemical Item No. 36700, CAS No. 1432494-65-9), NT1-014B (Cayman Chemical Item No. 37095, CAS No. 2739805-64-0), TCL053 (Cayman Chemical Item No. 37045, CAS No. 2361162-70-9), C12-200 (Cayman Chemical Item No. 36699, CAS No. 1220890-25-4), DLin-DMA (Cayman Chemical Item No. 36701, CAS No. 871258-12-7, also known as 1,2-Dilinoleyloxy-N,N-dimethyl-3-aminopropane), YSK05 (Cayman Chemical Item No. 35786, CAS No. 1318793-78-0), 3060i10 (Cayman Chemical Item No. 36698, CAS No. 2322290-93-5), Lipid 29 (Cayman Chemical Item No. 35337, CAS No. 2244716-55-8), L-319 (Cayman Chemical Item No. 35051, CAS No. 1351586-50-9), 93-0170 (Cayman Chemical Item No. 34366, CAS No. 2227214-78-8), ALC-0315 (Cayman Chemical Item No. 34337, CAS No. 2036272-55-4), 93-017S (Cayman Chemical Item No. 34367, CAS No. 2227008-67-3), Lipid 5 (Cayman Chemical Item No. 34372, CAS No. 2089251-33-0), DLin-MC3-DMA (Cayman Chemical Item No. 34364, CAS No. 1224606-06-7, also known as MC3), 1,2-Dioleyloxy-3-dimethylamino-propane (Cayman Chemical Item No. 15109, CAS No. 104162-47-2, also known as DODMA or MBN 305A), 1,2-Dioleoyl-3-dimethylammonium-propane (Cayman Chemical Item No. 25726, CAS No. 127512-29-2, also known as 18:1 DAP or DODAP), SM-102 (Cayman Chemical Item No. 33474, CAS No. 2089251-47-6, also known as Lipid H or LNP-102), DLin-KC2-DMA (Cayman Chemical Item No. 34363, CAS No. 1190197-97-7, also known as KC2), a variant or derivative thereof, or a combination thereof.

### Components of Lipidic Delivery Systems: Structural Lipids

[0328] As used herein, the term “structural lipid” refers to sterols and to lipids containing sterol moieties. Incorporation of structural lipids in the lipidic delivery systems of the present disclosure (e.g., a LNP, a liposome, or a combination thereof) can help mitigate aggregation of other lipids in the particle.

[0329] In some aspects, the structural lipid is selected from the group consisting of cholesterol, beta-cholesterol, ergosterol, 7-dehydrocholesterol, 24S-hydroxycholesterol, lanosterol, cycloartenol, fucosterol, saringosterol, campesterol, 0-sitosterol, sitostanol, coprostanol, avenasterol, stigmasterol, and any combination thereof. Other sterols suitable for use as structural lipids comprise cholesterol sulfate, desmosterol-d6, lathosterol-d7, desmosterol, dihydrolanosterol, zymosterol, lathosterol, zymosterol-d5, 14-demethyl-lanosterol, 14-demethyl-lanosterol-d6, 8(9)-dehydrocholesterol, 8(14)-dehydrocholesterol, diosgenin, DHEA sulfate, DHEA, lanosterol-d6, dihydrolanosterol-d7, campesterol-d6, lanosterol-95, dihydro FF-MAS-d6, zymostenol-d7, zymostenol, campestanol, 7-dehydrodesmosterol, pregnenolone, sitosterol-d7, dihydro T-MAS, delta 5-avenasterol, brassicasterol, dihydro FF-MAS, 24-methylene cholesterol, cholic acid derivatives, cholesteryl esters, glycosylated sterols, hopanoids, hydroxysteroid, phytosterol, zoosterol, gonane, dexamethasone, and medrogestone. In particular aspects, the LNP of the present disclosure comprise cholesterol.

### Components of Lipidic Delivery Systems: Helper Lipids

[0330] The term “helper lipid”, as used herein, refers to lipids other than the cationic or ionizable lipids and stabilizing lipid (generally PEG-conjugated lipids) that can influence the properties of the lipidic delivery systems of the present disclosure (e.g., a LNP, a liposome, or a combination thereof). Helper lipids function to stabilize and improve processing of the lipidic delivery systems of the present disclosure (e.g., a LNP, a liposome, or a combination thereof).

[0331] In some aspects, the helper lipid is a phospholipid. A phospholipid moiety can be selected, for example, from the non-limiting group consisting of phosphatidyl choline, phosphatidyl ethanolamine, phosphatidyl glycerol, phosphatidyl serine, phosphatidic acid, 2-lysophosphatidyl choline, and a sphingomyelin. Phospholipids can be of a symmetric or an asymmetric type. As used herein, the term “symmetric phospholipid” includes glycerophospholipids having matching fatty acid moieties and sphingolipids in which the variable fatty acid moiety and the hydrocarbon chain of the sphingosine backbone include a comparable number of carbon atoms. As used herein, the term “asymmetric phospholipid” includes lysolipids, glycerophospholipids having different fatty acid moieties (e.g., fatty acid moieties with different numbers of carbon atoms and/or unsaturations (e.g., double bonds)), and sphingolipids in which the variable fatty acid moiety and the hydrocarbon chain of the sphingosine backbone include a dissimilar number of carbon atoms (e.g., the variable fatty acid moiety include at least two more carbon atoms than the hydrocarbon chain or at least two fewer carbon atoms than the hydrocarbon chain). In some aspects, the helper lipid comprises at least one symmetric phospholipid. In some aspects, the symmetric phospholipid comprises or consists of a symmetric phosphocholine. In some aspects, the symmetric phosphocholine is selected from the group consisting of
[0332] 1,2-dipropionyl-sn-glycero-3-phosphocholine (03:0 PC),
[0333] 1,2-dibutyryl-sn-glycero-3-phosphocholine (04:0 PC),
[0334] 1,2-dipentanoyl-sn-glycero-3-phosphocholine (05:0 PC),
[0335] 1,2-dihexanoyl-sn-glycero-3-phosphocholine (06:0 PC),
[0336] 1,2-diheptanoyl-sn-glycero-3-phosphocholine (07:0 PC),
[0337] 1,2-dioctanoyl-sn-glycero-3-phosphocholine (08:0 PC),
[0338] 1,2-dinonanoyl-sn-glycero-3-phosphocholine (09:0 PC),
[0339] 1,2-didecanoyl-sn-glycero-3-phosphocholine (10:0 PC),
[0340] 1,2-diundecanoyl-sn-glycero-3-phosphocholine (11:0 PC, DUPC),
[0341] 1,2-dilauroyl-sn-glycero-3-phosphocholine (DLPC),
[0342] 1,2-dilinoleoyl-sn-glycero-3-phosphocholine (DLOPC),
[0343] 1,2-ditridecanoyl-sn-glycero-3-phosphocholine (13:0 PC),
[0344] 1,2-dimyristoyl-sn-glycero-3-phosphocholine (14:0 PC, DMPC),
[0345] 1,2-dipentadecanoyl-sn-glycero-3-phosphocholine (15:0 PC),
[0346] 1,2-dipalmitoyl-sn-glycero-3-phosphocholine (16:0 PC, DPPC),
[0347] 1,2-diphytanoyl-sn-glycero-3-phosphocholine (4ME 16:0 PC),
[0348] 1,2-diheptadecanoyl-sn-glycero-3-phosphocholine (17:0 PC),
[0349] 1,2-distearoyl-sn-glycero-3-phosphocholine (18:0 PC, DSPC),
[0350] 1,2-dinonadecanoyl-sn-glycero-3-phosphocholine (19:0 PC),
[0351] 1,2-diarachidoyl-sn-glycero-3-phosphocholine (20:0 PC),
[0352] 1,2-dihenarachidoyl-sn-glycero-3-phosphocholine (21:0 PC),
[0353] 1,2-dibehenoyl-sn-glycero-3-phosphocholine (22:0 PC),
[0354] 1,2-ditricosanoyl-sn-glycero-3-phosphocholine (23:0 PC),
[0355] 1,2-dilignoceroyl-sn-glycero-3-phosphocholine (24:0 PC),
[0356] 1,2-dimyristoleoyl-sn-glycero-3-phosphocholine (14:1 (Δ9-Cis) PC),
[0357] 1,2-dimyristelaidoyl-sn-glycero-3-phosphocholine (14:1 (Δ9-Trans) PC),
[0358] 1,2-dipalmitoleoyl-sn-glycero-3-phosphocholine (16:1 (Δ9-Cis) PC),
[0359] 1,2-dipalmitelaidoyl-sn-glycero-3-phosphocholine (16:1 (Δ9-Trans) PC),
[0360] 1,2-dipetroselenoyl-sn-glycero-3-phosphocholine (18:1 (Δ6-Cis) PC),
[0361] 1,2-dioleoyl-sn-glycero-3-phosphocholine (18:1 (Δ9-Cis) PC, DOPC),
[0362] 1,2-dielaidoyl-sn-glycero-3-phosphocholine (18:1 (Δ9-Trans) PC),
[0363] 1,2-dilinoleoyl-sn-glycero-3-phosphocholine (18:2 (Cis) PC, DLPC),
[0364] 1,2-dilinolenoyl-sn-glycero-3-phosphocholine (18:3 (Cis) PC, DLnPC),
[0365] 1,2-dieicosenoyl-sn-glycero-3-phosphocholine (20:1 (Cis) PC),
[0366] 1,2-diarachidonoyl-sn-glycero-3-phosphocholine (20:4 (Cis) PC, DAPC),
[0367] 1,2-dierucoyl-sn-glycero-3-phosphocholine (22:1 (Cis) PC),
[0368] 1,2-didocosahexaenoyl-sn-glycero-3-phosphocholine (22:6 (Cis) PC, DHAPC),
[0369] 1,2-dinervonoyl-sn-glycero-3-phosphocholine (24:1 (Cis) PC),
[0370] 1,2-dierucoyl-sn-glycero-3-phosphocholine (DEPC),
[0371] 1,2-di-O-octadecenyl-sn-glycero-3-phosphocholine (18:0 diether PC), and combinations thereof.

[0372] In some aspects, the symmetric phosphocholine is DSPC and/or DOPC. In some aspects, the symmetric phospholipid comprises or consists of a symmetric phosphoethanolamine (PE). In some aspects, the symmetric phosphoethanolamine is selected from the group consisting of:
[0373] 1,2-dihexanoyl-sn-glycero-3-phosphoethanolamine (06:0 PE),
[0374] 1,2-dioctanoyl-sn-glycero-3-phosphoethanolamine (08:0 PE),
[0375] 1,2-didecanoyl-sn-glycero-3-phosphoethanolamine (10:0 PE),
[0376] 1,2-dilauroyl-sn-glycero-3-phosphoethanolamine (12:0 PE),
[0377] 1,2-dimyristoyl-sn-glycero-3-phosphoethanolamine (14:0 PE, DMPE),
[0378] 1,2-dipentadecanoyl-sn-glycero-3-phosphoethanolamine (15:0 PE),
[0379] 1,2-dipalmitoyl-sn-glycero-3-phosphoethanolamine (16:0 PE, DPPE),
[0380] 1,2-diphytanoyl-sn-glycero-3-phosphoethanolamine (4ME 16:0 PE),
[0381] 1,2-diheptadecanoyl-sn-glycero-3-phosphoethanolamine (17:0 PE),
[0382] 1,2-distearoyl-sn-glycero-3-phosphoethanolamine (18:0 PE, DSPE),
[0383] 1,2-dipalmitoleoyl-sn-glycero-3-phosphoethanolamine (16:1 PE),
[0384] 1,2-dioleoyl-sn-glycero-3-phosphoethanolamine (18:1 (Δ9-Cis) PE, DOPE),
[0385] 1,2-dielaidoyl-sn-glycero-3-phosphoethanolamine (18:1 (Δ9-Trans) PE),
[0386] 1,2-dilinoleoyl-sn-glycero-3-phosphoethanolamine (18:2 PE, DLPE),
[0387] 1,2-dilinolenoyl-sn-glycero-3-phosphoethanolamine (18:3 PE, DLnPE),
[0388] 1,2-diarachidonoyl-sn-glycero-3-phosphoethanolamine (20:4 PE, DAPE),
[0389] 1,2-didocosahexaenoyl-sn-glycero-3-phosphoethanolamine (22:6 PE, DHAPE),
[0390] 1,2-dierucoyl-sn-glycero-3-phosphoethanolamine (DEPE), and any combination thereof.

[0391] In some aspects, the symmetric phosphoethanolamine is DSPE and/or DOPE. In some aspects, the helper lipid can comprise an asymmetric phospholipid such as MPPC, MSPC, PMPC, PSPC, POPC, PLPC, SMPC, SPPC, SOPC, OMPC, OPPC, OSPC, POPE, or a combination thereof. In some aspects, the helper lipid can comprise a lysolipid, e.g., a lyso PC or a lyso PE. Lysophospholipids are derivatives of a phospholipid in which one or both fatty acyl chains have been removed by hydrolysis. In some aspects, the helper lipid can comprise a phosphoglycerol (PG), such as DEPG, DLPG, DMPG, DOPG or DPPG; a phosphoserine (PS), such as DEPS, DLPS, DMPS, DOPS or DPPS; a phosphatidic acid (PA), such as DEPA, DLPA, DMPA, DOPA, or DPPA, or a combination thereof.

### Components of Lipidic Delivery Systems: PEG-Lipids

[0392] As used herein, the term “PEG-modified lipid” or “PEG-lipid” refers to a lipid-linked (e.g., covalently attached) to at least one PEG polymer chain. In some embodiments, the PEG-lipid described herein comprises a poly(ethylene) glycol chain of up to 5, 10 or 20 kDa in length covalently attached to a lipid with alkyl chain(s) of C6-C20 length.

[0393] In some embodiments, the PEG-lipid is reversibly linked to the lipidic delivery system of the present disclosure (e.g., a LNP, a liposome, or a combination thereof) and the PEG moiety is gradually released in blood circulation upon administration. In some aspects, an alternative to a PEG-lipid can be used, for example, a derivatized lipid such as a derivatized ceramide (PEG-CER), including N-Octanoyl-Sphingosine-1-[Succinyl(Methoxy Polyethylene Glycol)-2000](C8 PEG-2000 ceramide). In some embodiments, the PEG-lipid described herein comprises or consists of a PEG-phospholipid and/a PEG-ceramide. In some aspects, the PEG-lipid is a PEG-modified phosphatidylethanolamine, a PEG-modified phosphatidic acid, a PEG-modified ceramide, a PEG-modified dialkylamine, a PEG-modified diacylglycerol, a PEG-modified dialkylglycerol, or a combination thereof. In some aspects, the PEG-lipid is selected from the group consisting of PEG-c-DOMG, PEG-DMG, PEG-DLPE, PEG-DMPE, PEG-DPPC, PEG-DSPE, and any combination thereof. In some aspects, the PEG-lipid is DMG-PEG2000. In some aspects, the PEG-lipid is DSPE-PEG2000. In some aspects, the PEG-lipid is a ceramide PEG derivatives such as C8 PEG2000 ceramide, C16 PEG2000 ceramide, C8 PEG5000 ceramide, C16 PEG5000 ceramide, C8 PEG750 ceramide, and C16 PEG750 ceramide. In some aspects, the PEG-lipid is a PEG derivative, such as 16:0 PEG5000 PE, 14:0 PEG5000 PE, 18:0 PEG5000 PE, 18:1 PEG5000 PE, 16:0 PEG3000 PE, 14:0 PEG3000 PE, 18:0 PEG3000 PE, 18:1 PEG3000 PE, 16:0 PEG2000 PE, 14:0 PEG2000 PE, 18:0 PEG2000 PE, 18:1 PEG2000 PE, 16:0 PEG1000 PE, 14:0 PEG1000 PE, 18:0 PEG1000 PE, 18:1 PEG1000 PE, 16:0 PEG750 PE, 14:0 PEG750 PE, 18:0 PEG750 PE, 18:1 PEG750 PE, 16:0 PEG550 PE, 14:0 PEG550 PE, 18:0 PEG550 PE, 18:1 PEG550 PE, 16:0 PEG350 PE, 14:0 PEG350 PE, 18:0 PEG350 PE, and 18:1 PEG350. In some aspects, the PEG-lipid is a sterol PEG derivative such as Chol-PEG600. In some aspects, the PEG-lipid is a glycerol PEG derivative such as DMG-PEG5000, DSG-PEG5000, DPG-PEG5000, DMG-PEG3000, DSG-PEG3000, DPG-PEG3000, DMG-PEG2000, DSG-PEG2000, DPG-PEG2000, DMG-PEG1000, DSG-PEG1000, DPG-PEG1000, DMG-PEG750, DSG-PEG750, DPG-PEG750, DMG-PEG550, DSG-PEG550, DPG-PEG550, DMG-PEG350, DSG-PEG350, and DPG-PEG350. In some aspects, the PEG-lipid is a phospholipid PEG derivative such as DSPE-PEG5000, DSPE-PEG2000, DSPE-PEG1000, or DSPE-PEG550.

[0394] Contemplated PEG-modified lipids include, but are not limited to, a polyethylene glycol chain of up to 5 kDa in length covalently attached to a lipid with alkyl chain(s) of C6-C20 length. In some specific aspects, the PEG-lipid employed in the compositions and methods of the present disclosure is 1,2-dimyristoyl-sn-glycerol, methoxypolyethylene Glycol (2000 MW PEG) “DMG-PEG2000.”

[0395] The addition of PEG-modified lipids to the lipid delivery vehicle can prevent complex aggregation and can also provide a means for increasing circulation lifetime and increasing the delivery of the lipid-polynucleotide composition to the target tissues, (Klibanov et al. (1990) FEBS Letters, 268 (1): 235-237), or they can be selected to rapidly exchange out of the formulation in vivo (see U.S. Pat. No. 5,885,613). Particularly useful exchangeable lipids are PEG-ceramides having shorter acyl chains (e.g., C14 or C18). In some embodiments, the lipid moiety of the PEG-lipids includes those having lengths of from about C14 to about C22, such as from about C14 to about C16. In some embodiments, a PEG moiety, for example an mPEG-NH2, has a size of about 1000, 2000, 5000, 10,000, 15,000 or 20,000 daltons. In some aspects, the PEG-lipid is a non-diffusible PEG conjugates. Non-limiting examples of non-diffusible PEG conjugates include PEG-DSG and PEG-DSPE.

### Components of Lipidic Delivery Systems: Chemically Modified Lipids

[0396] In some aspects, the lipidic delivery system of the present disclosure (e.g., a LNP, a liposome, or a combination thereof) comprises a chemically modified lipid. As used herein, the term “chemically modified lipid” refers to a lipid that has been modified to be derivatizable by incorporating a chemically reactive group (e.g., a maleimide group or a sulfhydryl group) that can be used to attach a biologically active moiety (e.g., an antibody) covalently (e.g., via reaction between the maleimide group and a sulfhydryl group) or non-covalently to the lipid.

[0397] In some aspects, the lipidic delivery system of the present disclosure (e.g., a LNP, a liposome, or a combination thereof) further comprises a derivatizable lipid, e.g., a PEG lipid comprising a maleimide group such as DSPE-PEG2000-maleimide) wherein the maleimide reactive group is free (i.e., prior to the reaction with an antibody). In some aspects, the derivatizable lipid is conjugated to a targeting molecule (e.g., an antibody, such as a bispecific anti CD3/anti CD28 antibody) thereby anchoring the targeting molecule to the surface of the LNP.

[0398] In some aspects, where a certain class of lipids present in a lipidic delivery system of the present disclosure includes both a chemically modified lipid and an unmodified lipid, the chemically modified lipid can be derived from the unmodified lipid. By way of example, the one or more lipids of a lipidic delivery system of the present disclosure can include an unmodified DSPE-PEG2000 lipid and a modified DSPE-PEG2000 lipid that includes a functionalized group capable of forming a covalent bond, e.g., DMG-PEG2000-maleimide or DSPE-PEG2000-maleimide.

[0399] In some aspects, a lipidic delivery system of the present disclosure (e.g., a LNP, a liposome, or a combination thereof) can comprise DMG-PEG2000-maleimide or DSPE-PEG2000-maleimide. In some aspects, a lipidic delivery system of the present disclosure (e.g., a LNP, a liposome, or a combination thereof) can comprise DMG-PEG2000-SH or DSPE-PEG2000-SH.

[0400] In some aspects, the chemically modified lipid is selected from the group consisting of DSPE-PEG2000-maleimide, DSPE-PEG5000-maleimide, DMG-PEG2000-maleimide, DMG-PEG5000-maleimide, cholesterol-PEG2000-maleimide, cholesterol-PEG5000-maleimide, DSPE-PEG2000-SH, DSPE-PEG5000-SH, DMG-PEG2000-SH, DMG-PEG5000-SH, cholesterol-PEG2000-SH, and cholesterol-PEG5000-SH.

### Components of Lipidic Delivery Systems: Other Lipids Components

[0401] In some aspects, a lipidic delivery system of the present disclosure (e.g., a LNP, a liposome, or a combination thereof) can comprise additional components such as fatty acids, lysolipids, or vitamins. In some aspects, the fatty acid is a short-chain, medium-chain, or long-chain fatty acid. In some aspects, the fatty acid is a saturated fatty acid. In some aspects, the fatty acid is an unsaturated fatty acid. In some aspects, the fatty acid is a monounsaturated fatty acid. In some aspects, the fatty acid is a polyunsaturated fatty acid, such as a ω-3 (omega-3) or ω-6 (omega-6) fatty acid.

### Specific Liposome Compositions

[0402] In some aspect, an AAV-ITR based gene delivery system of the present disclosure or a component thereof, such as an AAV-ITR vector or Rep vector, is encapsulated in a liposome. These delivery systems can systems can be selected from commercially available systems and/or can be specially designed. For example, in some aspects, the AAV-ITR vector can be encapsulated in a LIPOFECTAMINE 2000™ liposome. In some aspects, the Rep vector can be encapsulated in a LIPOFECTAMINE MESSENGER MAX™ liposome.

[0403] LIPOFECTAMINE™ is a cationic liposome formulation, which complexes with negatively charged nucleic acid molecules to allow them to overcome the electrostatic repulsion of the cell membrane. LIPOFECTAMINE™'s cationic lipid molecules are formulated with a neutral co-lipid (helper lipid). The DNA-containing liposomes (with positive charge on their surfaces) can fuse with the negatively charged plasma membrane of living cells, due to the neutral co-lipid mediating fusion of the liposome with the cell membrane, allowing nucleic acid to cross into the cytoplasm and contents to be available to the cell for replication or expression.

[0404] LIPOFECTAMINE™ consists of a 3:1 mixture of DOSPA (2,3-dioleoyloxy-N-[2(sperminecarboxamido)ethyl]-N,N-dimethyl-1-propaniminium trifluoroacetate) and DOPE (1,2-dioleoyl-sn-glycero-3-phosphoethanolamine), which complexes with negatively charged nucleic acid molecules to allow them to overcome the electrostatic repulsion of the cell membrane. See Yang et al., Gene Ther 5, 380-387 (1998); Dalby et al. Methods. 33 (2): 95-103 (2004); and U.S. Pat. No. 7,479,573, which are herein incorporated by reference in their entireties.

### Specific LNP Compositions

[0405] In some aspects, an AAV-ITR based gene delivery system of the present disclosure or a component thereof, such as an AAV-ITR vector or Rep vector, is encapsulated in a LNP. In some aspects, the LNP contains a molar ratio (mol-%) of the cationic or ionizable lipid or lipidoid (e.g., cKK-E12, ALC-0315, SSOP, SM-102, Lipid 10, or a combination thereof) from about 30% to about 60% mol-%. In some aspects, the molar ratio of the cationic or ionizable lipid or lipidoid (e.g., cKK-E12, ALC-0315, KC2, MC3, SSOP, SM-102, Lipid 10, or a combination thereof) is about 30%, about 35%, about 40%, about 45%, about 50%, about 55%, or about 60%. In some aspects, the molar ratio of the cationic or ionizable lipid or lipidoid (e.g., cKK-E12, ALC-0315, KC2, MC3, SSOP, SM-102, Lipid 10, or a combination thereof) is between about 30% and about 35%, between about 35% and 40%, between about 40% and about 45%, between about 45% and about 50%, between about 50% and about 55%, or between about 55% and about 60%. In some aspects, the molar ratio of the cationic or ionizable lipid or lipidoid (e.g., cKK-E12, ALC-0315, SSOP, SM-102, Lipid 10, or a combination thereof) is between 30% and about 60%, between about 35% and about 55%, or between about 40% and about 50%. In a specific aspect, the molar ratio of the cationic or ionizable lipid or lipidoid (e.g., cKK-E12, ALC-0315, KC2, MC3, SSOP, SM-102, Lipid 10, or a combination thereof) is about 35%.

[0406] In some aspects, the LNP contains a molar ratio (mol-%) of the structural lipid (e.g., cholesterol, beta-cholesterol, or a combination thereof) from about 20% to about 60% mol-%. In some aspects, the molar ratio of the structural lipid (e.g., cholesterol) is about 20%, about 25%, about 30%, about 35%, about 40%, about 45%, about 50%, about 55%, or about 60%. In some aspects, the molar ratio of the structural lipid (e.g., cholesterol) is between about 20% and about 25%, about 25% and about 30%, about 30% and about 35%, between about 35% and 40%, between about 40% and about 45%, between about 45% and about 50%, between about 50% and about 55%, or between about 55% and about 60%. In some aspects, the molar ratio of the structural lipid (e.g., cholesterol) is between 20% and about 60%, between about 25% and about 55%, or between about 30% and about 50%, or between about 35% and about 45%. In a specific aspect, the molar ratio of the structural lipid (e.g., cholesterol) is about 46.5%.

[0407] In some aspects, the LNP contains a molar ratio (mol-%) of total phospholipid from about 5% to about 30% mol-%. As used herein total phospholipid refers to the total amount of helper lipid (e.g., DSPE, DSPC, DOPE, DOPE, or a combination thereof), PEG lipid (e.g., a DMG-PEG2000, DSPE-PEG2000, or a combination thereof), and chemically modified lipid (e.g., DSPE-PEG2000-maleimide). In some aspects, the molar ratio of total phospholipid is about 5%, about 10%, about 15%, about 20%, about 25%, or about 30%. In some aspects, the molar ratio of total phospholipid is between about 5% and about 10%, about 10% and about 15%, about 15% and about 20%, about 20% and about 25%, or about 25% and about 30%. In some aspects, the molar ratio of total phospholipid is between about 5% and about 30%, about 10% and about 25%, and about 15% and about 20%. In a specific aspect, the molar ratio of total phospholipid is about 18.5% (comprising about 16% of helper lipid, about 2% of PEG-lipid, and about 0.5% of chemically modified lipid).

[0408] In some aspects, the LNP comprises:
[0409] (1) a molar ratio (mol-%) of the cationic or ionizable lipid or lipidoid (e.g., cKK-E12, ALC-0315, KC2, MC3, SSOP, SM-102, Lipid 10, or a combination thereof) from about 30% to about 60% mol-%;
[0410] (2) a molar ratio (mol-%) of the structural lipid (e.g., cholesterol, beta-cholesterol, or a combination thereof) from about 20% to about 60% mol-%; and,
[0411] (3) a molar ratio (mol-%) of total phospholipid from about 5% to about 30% mol-%.

[0412] In some aspects, the LNP comprises:
[0413] (1) a molar ratio of the cationic or ionizable lipid or lipidoid (e.g., cKK-E12, ALC-0315, KC2, MC3, SSOP, SM-102, Lipid 10, or a combination thereof) of about 30%, about 35%, about 40%, about 45%, about 50%, about 55%, or about 60%;
[0414] (2) a molar ratio of the structural lipid (e.g., cholesterol) of about 20%, about 25%, about 30%, about 35%, about 40%, about 45%, about 50%, about 55%, or about 60%; and,
[0415] (3) a molar ratio of total phospholipid about 5%, about 10%, about 15%, about 20%, about 25%, or about 30%.

[0416] In some aspects, the LNP comprises:
[0417] (1) a molar ratio of the cationic or ionizable lipid or lipidoid (e.g., cKK-E12, ALC-0315, KC2, MC3, SSOP, SM-102, Lipid 10, or a combination thereof) between about 30% and about 35%, between about 35% and 40%, between about 40% and about 45%, between about 45% and about 50%, between about 50% and about 55%, or between about 55% and about 60%;
[0418] (2) a molar ratio of the structural lipid (e.g., cholesterol) between about 20% and about 25%, about 25% and about 30%, about 30% and about 35%, between about 35% and 40%, between about 40% and about 45%, between about 45% and about 50%, between about 50% and about 55%, or between about 55% and about 60%; and,
[0419] (3) a molar ratio of total phospholipid between about 5% and about 10%, about 10% and about 15%, about 15% and about 20%, about 20% and about 25%, or about 25% and about 30%.

[0420] In some aspects, the LNP comprises:
[0421] (1) a molar ratio of the cationic or ionizable lipid or lipidoid (e.g., cKK-E12, ALC-0315, KC2, MC3, SSOP, SM-102, Lipid 10, or a combination thereof) between 30% and about 60%, between about 35% and about 55%, or between about 40% and about 50%;
[0422] (2) a molar ratio of the structural lipid (e.g., cholesterol) between 20% and about 60%, between about 25% and about 55%, or between about 30% and about 50%, or between about 35% and about 45%; and,
[0423] (3) a molar ratio of total phospholipid between about 5% and about 30%, about 10% and about 25%, and about 15% and about 20%.

[0424] In some aspects, the LNP comprises:
[0425] (1) a molar ratio of the cationic or ionizable lipid or lipidoid (e.g., cKK-E12, ALC-0315, KC2, MC3, SSOP, SM-102, Lipid 10, or a combination thereof) of about 35%;
[0426] (2) a molar ratio of the structural lipid (e.g., cholesterol) of about 46.5%; and,
[0427] (3) a molar ratio of total phospholipid of about 18.5% (comprising about 16% of helper lipid, about 2% of PEG-lipid, and about 0.5% of chemically modified lipid).

[0428] In some aspects, the LNP comprises:
[0429] (a) a cationic or ionizable lipid or lipidoid (e.g., cKK-E12, AIC-0315, SM-102, YK-009, DLin-MC3-DMA, KC2, A6, OF-02, A18-Iso5-2DC18, 98N12-5, 9A1p9, C12-200, 7C1, G0-C14, L319, 304O13, OF-Deg-Lin, 306-O12B, 3060i10, Lipid 10, or FTT5);
[0430] (b) a structural lipid (e.g., cholesterol or beta-cholesterol);
[0431] (c) a helper lipid (e.g., a phospholipid such as DSPE, DSPC, DOPC or DOPE); and,
[0432] (d) a stabilizing lipid (e.g., a PEG lipid such as DMG-PEG1000, DMG-PEG2000, DMG-PEG1000).

[0433] In some aspects, the weight ratio (w/w) between the cationic or ionizable lipid or lipidoid (e.g., cKK-E12, ALC-0315, KC2, MC3, SSOP, SM-102, Lipid 10, or a combination thereof) and the payload (e.g., an AAV-ITR vector or a Rep vector) is from about 5% to about 15%. In some aspects, the weight ratio (w/w) between the cationic or ionizable lipid or lipidoid (e.g., cKK-E12, ALC-0315, KC2, MC3, SSOP, SM-102, Lipid 10, or a combination thereof) and the payload (e.g., an AAV-ITR vector or a Rep vector) is about 5%, about 6%, about 7%, about 8%, about 9%, about 10%, about 11%, about 12%, about 13%, about 14%, or about 15%. In some aspects, the weight ratio (w/w) between the cationic or ionizable lipid or lipidoid (e.g., cKK-E12, ALC-0315, KC2, MC3, SSOP, SM-102, Lipid 10, or a combination thereof) and the payload (e.g., an AAV-ITR vector or a Rep vector) is between about 5% and about 6%, about 6% and about 7%, about 7% and about 8%, about 8% and about 9%, about 9% and about 10%, about 10% and about 11%, about 11% and about 12%, about 12% and about 13%, about 13% and about 14%, or about 14% and about 15%. In some aspects, the weight ratio (w/w) between the cationic or ionizable lipid or lipidoid (e.g., cKK-E12, ALC-0315, KC2, MC3, SSOP, SM-102, Lipid 10, or a combination thereof) and the payload (e.g., an AAV-ITR vector or a Rep vector) is between about 5% and about 15%, about 6% and about 14%, about 7% and about 13%, about 8% and about 12%, or about 9% and about 11%. In a specific aspect, the weight ratio (w/w) between the cationic or ionizable lipid or lipidoid (e.g., cKK-E12, ALC-0315, KC2, MC3, SSOP, SM-102, Lipid 10, or a combination thereof) and the payload (e.g., a AAV-ITR vector or a Rep vector) about 18.5% (comprising about 16% of helper lipid, about 2% of PEG-lipid, and about 0.5% of chemically modified lipid).

[0434] In some aspects, the LNP comprises a molar ratio (mol-%) of cholesterol of about 46.5%. In some aspects, the LNP comprises a molar ratio (mol-%) of cholesterol of about 40%, about 41%, about 42%, about 43%, about 44%, about 45%, about 46%, about 47%, about 48%, about 49%, about 50%, about 51% or about 52%.

[0435] In some aspects, the LNP comprises a molar ratio (mol-%) of DSPE-PEG2000-maleimide of about 0.5%. In some aspects, the LNP comprises a molar ratio (mol-%) of DSPE-PEG2000-maleimide of about 0.1%, about 0.2%, about 0.3%, about 0.4%, about 0.5%, about 0.6%, about 0.7%, about 0.8%, about 0.9%, or about 1%.

[0436] In some aspects, the LNP comprises a molar ratio (mol-%) of DOPE of about 16%. In some aspects, the LNP comprises a molar ratio (mol-%) of DOPE of about 10%, about 11%, about 12%, about 13%, about 14%, about 15%, about 16%, about 17%, about 18%, about 19%, about 20%, about 21% or about 22%.

[0437] In some aspects, the LNP comprises a molar ratio (mol-%) of cKK-E12 of about 35%. In some aspects, the LNP comprises a molar ratio (mol-%) of cKK-E12 of about 30%, about 31%, about 32%, about 33%, about 34%, about 35%, about 36%, about 37%, about 38%, about 39%, or about 40%.

[0438] In some aspects, the LNP comprises a molar ratio (mol-%) of Lipid 10 of about 35%. In some aspects, the LNP comprises a molar ratio (mol-%) of Lipid 10 of about 30%, about 31%, about 32%, about 33%, about 34%, about 35%, about 36%, about 37%, about 38%, about 39%, or about 40%.

[0439] In some aspects, the LNP comprises a molar ratio (mol-%) of DMG-PEG2000 of about 2%. In some aspects, the LNP comprises a molar ratio (mol-%) of DMG-PEG2000 of about 1%, about 1.2%, about 1.4%, about 1.6%, about 1.8%, about 2%, about 2.2%, about 2.4%, about 2.6%, about 2.8%, or about 3%.

[0440] In some aspects, the LNP comprises:
[0441] (1) a molar ratio (mol-%) of cholesterol of about 46.5%;
[0442] (2) a molar ratio (mol-%) of DSPE-PEG2000-maleimide of about 0.5%;
[0443] (3) a molar ratio (mol-%) of DOPE of about 16%;
[0444] (4) a molar ratio (mol-%) of cKK-E12, ALC-0315, SSOP, SM-102, Lipid 10, or a combination thereof of about 35%; and,
[0445] (5) a molar ratio (mol-%) of DMG-PEG2000 of about 2%.

[0446] In some aspects, the LNP comprises:
[0447] (1) a molar ratio (mol-%) of cholesterol of about 38.5%;
[0448] (2) a molar ratio (mol-%) of DSPE-PEG2000-maleimide of about 0.2%;
[0449] (3) a molar ratio (mol-%) of DOPE, DSPC, or a combination thereof of about 10%;
[0450] (4) a molar ratio (mol-%) of cKK-E12, ALC-0315, KC2, MC3, SSOP, SM-102, Lipid 10, or a combination thereof of about 50%; and,
[0451] (5) a molar ratio (mol-%) of DMG-PEG2000 of about 1.3%.

[0452] In some aspects, the LNP comprises:
[0453] (1) a molar ratio (mol-%) of cholesterol of about 40%, about 41%, about 42%, about 43%, about 44%, about 45%, about 46%, about 47%, about 48%, about 49%, about 50%, about 51% or about 52%;
[0454] (2) a molar ratio (mol-%) of DSPE-PEG2000-maleimide of about 0.1%, about 0.2%, about 0.3%, about 0.4%, about 0.5%, about 0.6%, about 0.7%, about 0.8%, about 0.9%, or about 1%;
[0455] (3) a molar ratio (mol-%) of DOPE of about 10%, about 11%, about 12%, about 13%, about 14%, about 15%, about 16%, about 17%, about 18%, about 19%, about 20%, about 21% or about 22%;
[0456] (4) a molar ratio (mol-%) of cKK-E12, AL-0315, KC2, MC3, SSOP, SM-102, Lipid 10, or a combination thereof of about 30%, about 31%, about 32%, about 33%, about 34%, about 35%, about 36%, about 37%, about 38%, about 39%, or about 40%; and,
[0457] (5) a molar ratio (mol-%) of DMG-PEG2000 of about 1%, about 1.2%, about 1.4%, about 1.6%, about 1.8%, about 2%, about 2.2%, about 2.4%, about 2.6%, about 2.8%, or about 3%.

[0458] In some aspects, the LNP comprises:
[0459] (1) a molar ratio (mol-%) of cholesterol of about 46.5±4%;
[0460] (2) a molar ratio (mol-%) of DSPE-PEG2000-maleimide of about 0.5±0.1%;
[0461] (3) a molar ratio (mol-%) of DOPE of about 16%±2%;
[0462] (4) a molar ratio (mol-%) of cKK-E12 (or, e.g., AL-0315, KC2, MC3, SSOP, SM-102, Lipid 10, or a combination thereof) of about 35±4%; and,
[0463] (5) a molar ratio (mol-%) of DMG-PEG2000 of about 2±0.2%.

[0464] The selection of cationic or ionizable lipids, structural lipids, PEG-lipids, helper lipids, and chemically modified lipids and lipid conjugates which comprise the LNP, as well as the relative molar ratio of such lipids to each other, is based upon the characteristics of the selected lipid(s), the nature of the intended target cells, and the characteristics of the payload (e.g., an AAV-ITR vector or a Rep vector) to be delivered. Additional considerations include, for example, the saturation of the alkyl chain, as well as the size, charge, pH, pKa, fusogenicity and toxicity of the selected lipid(s). Thus, the molar ratios of each individual component can be adjusted accordingly.

[0465] In some aspects, the LNP comprises GenVoyILM™. In some aspects, the LNP does not comprise GenVoyILM™. In some aspects, the LNP does not comprise 50% ionizable lipid, 10% DSPC, 37% cholesterol, and 2.5% stabilizing lipid. In some aspects, the LNP does not comprise 50% ionizable lipid. In some aspects, the LNP does not comprise 10% DSPC. In some aspects, the LNP does not comprise 37%% cholesterol. In some aspects, the LNP does not comprise 2.5% stabilizing lipid. See Kitte R, Rabel M, Geczy R, Park S, Fricke S, Kohl U, Tretbar U S, Lipid Nanoparticles (LNPs) outperform Electroporation in mRNA-based CAR T cell Engineering, Molecular Therapy: Methods & Clinical Development (2023), doi.org/10.1016/j.omtm.2023.101139, which is herein incorporated by reference in its entirety.

[0466] In some aspects, the LNP does not have an average Mw in g/mol of approximately 630.5 Da. In some aspects, the LNP does not have Z-Avg diameter of 45-75 nm when the payload is siRNA. In some aspects, the LNP does not have a Z-Avg diameter pf 60-120 nm when the payload is mRNA. In some aspects, the LNP is not a LNP composition disclosed in WO2023057979A1, WO2018119514A1, WO2020210901A1, WO2020206231A1, WO2018064755A1, WO2020252589A1, WO2021000041A1, or WO2019210394A1, which are herein incorporated by reference in their entireties.

[0467] The lipidic delivery systems for use in the AAV-ITR based gene delivery system of the present disclosure can be prepared by various techniques which are presently known in the art. Nucleic acid-lipid particles and their method of preparation are disclosed in, for example, U.S. Patent Publication Nos. 2004/0142025 and 2007/0042031, the disclosures of which are herein incorporated by reference in their entirety for all purposes. Selection of the appropriate particle size and composition of the lipidic delivery system, e.g., a liposome or LNP must take into consideration, e.g., the target cell and the payload.

### Polymeric Delivery Systems

[0468] In aspects, an AAV-ITR based gene delivery system of the present disclosure or one of its components (e.g., the AAV-ITR vector or the Rep vector) can be formulated in a polymeric delivery system. See, e.g., Cai et al. (2023) Pharmaceutics 15(5): 1502, which is incorporated herein by reference in its entirety. In some aspect, the polymeric delivery system comprises a cationic polymer, e.g., a synthetic polymer or a natural polymer.

[0469] Synthetic polymers are a class of polymers produced artificially by the chemical polymerization reaction of small molecules or modification of natural polymers, as distinct from naturally occurring polymers. Depending on the reaction monomer and the reaction mechanism, different kinds of synthetic polymers can be obtained. In some aspects, the synthetic polymer is a conventional polymer, e.g., a polymer selected from the group consisting of a DEAE-dextran, a poly-amino acid, a poly(amidoamine) (PAMAM) dendrimer, PPI (poly-(propylenimine)), PEI (polyethylenimine), PDMAEMA (polymethacrylic acid N,N-dimethylaminoethyl ester). DEAE-dextran is a chemically modified analog of dextran. By modification with diethylaminoethylen groups, the amidation of the dextran chains is readily protonated, which allows it to self-assemble into nanoparticles with negatively charged nucleic acids. DEAE-dextran was the first cationic polymer to be used for nucleic acid transfection. Poly-amino acids such as PLL (poly-L-Lysine) can also be used in polymeric delivery systems. PLL is a positively charged poly-amino acid under physiological conditions. PLL can bind to plasmid DNAs (pDNAs) and condense them into compact particles when the chain length is more than 20 residues. The covalent attachment of ligands on PLL significantly enhances endocytosis via receptor-mediated pathways. PLL linked with folic acid or transferrin can be used for the transfection of pDNAs into cancer cells. PLO (poly-L-ornithine) shares the properties of PLL, but achieves a 10-fold increase in transfection efficiency compared to PLL. Poly(amidoamine) (PAMAM) dendrimers are repetitive units of three-dimensional branched macromolecules with plenty of active amine groups on the surface. Both pDNA and siRNA can be encapsulated into condensed forms by PAMAM. PPI (poly-(propylenimine)) is a highly branched spherical dendrimer with primary amino groups at the periphery, and is hydrophobic in the interior. Genes transfected by PPI are able to be expressed in the liver. PEI (polyethylenimine) can perform with high transfection efficiency when forming a complex with pDNA. Its condensation ability and surface charge rose as the molecular weight of the compound grows. Similar to PAMAM, PEI induces the proton sponge effect. Its buffering capacity causes osmotic swelling and endosome rupture, allowing the polyplexes to escape into the cytoplasm. Other factors, in addition to the proton sponge effect, are thought to cause endosome escape. PEI, for example, can cause endosome membrane destabilization by generating hydrophilic pores in the lipid bilayer, resulting in endosome disruption. Two kinds of PEI, branched PEI (BPEI) and linear PEI (LPEI), are commercially accessible. LPEI exhibits better transfection efficiency than BPEI, especially in non-dividing cells. PDMAEMA (polymethacrylic acid N,N-dimethylaminoethyl ester) is responsive to both temperature and pH. PDMAEMA with a molecular weight of more than 300 kDa efficiently condenses DNA into compact nanoparticles, while those less than 300 kDa cannot. Linear, highly branched, and star-shaped structures are three kinds of PDMAEMA. The star-shaped PDMAEMA, according to previous studies, shows better transfection efficiency than the other two.

[0470] In some aspects, the synthetic polymer is a polyester. PBAE (poly(O-amino ester)) is a cationic polymer synthesized with acrylates and amines via Michael addition reactions. The surface charge density of PBAE is lower than that of other cationic polymers, which means its binding strength with nucleic acid is lower. As a result, the amount of PBAE required for nucleic acid binding should be significantly higher than that required for PEI, PPI, and other cation polymers. Even so, transfection with PBAEs as vectors is more efficient, due to its reduced cytotoxicity. Endcaps containing secondary amines or other amine-containing groups have been demonstrated to boost the binding capacity of PBAE and the overall transfection efficiency. PHP (Poly(4-hydroxy-L-proline ester)), which is made of hydroxyproline from natural sources such as collagen, gelatin, and other proteins, was the first polyester used as a gene carrier. PHP ester's transfection effectiveness is on par with that of poly-L-lysine. PAGA (poly[α-(4-aminobutyl)-1-glycolic acid]) can strongly form complexes with DNA at charge ratios below 2. PVL poly(6-valerolactone)-based polymers have been used as vectors for delivering genes. The transfection effectiveness was significantly impacted by the monomer arrangement and aliphatic side-chain length. He and colleagues produced new functional PVL copolymers using the ring opening polymerization of tertiary amine- and alkylated valerolactone-containing monomers. They proved that pDNA and functional PVL copolymers can successfully interact to generate pDNA/PVL polyplexes. The transfection effectiveness of the best functional PVL copolymer with the ideal chemical structure can be 2.2 times greater than PEI. Aminated PAHA (aminated poly(α-hydroxy acids)) can also be used in polymeric delivery systems. Poly(1)-g-AET2 (PAET), a newly developed amino PAHA polymer, has low toxicity and outstanding cell penetration and gene delivery characteristics. PPE (polyphosphoester)-based micelle systems can bind siRNA and treat hypoxic tumors and lung cancer. Chemotherapeutic agents, such as paclitaxel, can also be delivered through these micelles, and do not cause carrier-related toxicity nor activate innate immunity.

[0471] In some aspects, the synthetic polymer is a polylactide(Poly(lactic acid), PLA). Micelles constructed of polylactides are a dependable mRNA delivery system. PLA itself has only seldom been used as a gene delivery vector, due to the scarcity of cationic compounds on its backbone. To address this issue newly created cationic polyactides (CPLAs) have been shown to be efficient at delivering siRNA and pDNA into cancer cells.

[0472] In some aspects, the synthetic polymer is a polycarbonate. Polyethylenimine-grafted polycarbonates can produced high gene transfection at high polymer concentrations while causing moderate cytotoxicity. Biodegradable cationic siRNA carrier for pancreatic cancer therapy have used polycarbonates generated from carbon dioxide (CPCHC). CPCHCs are capable of efficiently preventing siRNA from being destroyed by RNase, and encouraging siRNA to escape from the endosomes for an extended period of time.

[0473] In some aspects, the synthetic polymer is a polyurethane (PUs). Cationic polyurethanes can be used as non-viral vectors, since they have positive charges and possible biofeatures. One such non-viral vector for gene delivery is N,N-diethylethylenediamine-polyurethane (DEDA-PU), which contains tertiary amines in the backbone and side chains. DEDA-PU has a transfection effectiveness that is comparable to PDMAEMA and much less cytotoxicity than PDMAEMA, allowing it to deliver plasmid DNA into cells.

[0474] In some aspects, the synthetic polymer is a conjugated polymers (CP). CPs are a type of polymer with a delocalized electronic structure and π-conjugated backbones. CPs can be modified with different side chains for use in drug and gene delivery systems for cancer therapy. Some of the most commonly used CPs for gene delivery include poly(p-phenyleneethynylene), polythiophene, poly(fluorine-co-phenylene), and poly(p-phenylenevinylene). These polymers are biocompatible, and can bond to nucleic acids through electrostatic interactions, hydrophobic interactions, or hydrogen bonds.

[0475] In some aspects, the polymer is a natural polymer. Naturally occurring polymers synthesized from living organisms are classified as natural polymers. These polymers possess good biocompatibility and are readily available in large yields, making them advantageous for the development of natural polymers for biological applications. In some aspects the natural polymer is a protein. In some aspects, the protein is selected from the group consisting of a histone, gelatin, and protamine. Histones are able to bind negatively charged nucleic acids through electrostatic interactions, and naturally target the nucleus. The histone-mediated transfection of nucleic acids, called histonefection, is effective in transfecting DNA, mRNA, and siRNA, especially into primary cell lines. A non-viral fibroblast-targeting DNA carrier called H2A-YG2 was made by fusing histone H2A with the PDGFR-binding peptide, YG2. The fusion vector increased DNA internalization only in PDGFRP-positive cells. Gelatin, unlike other polymers, n has amino acid sequences in its structure, such as Arg-Gly-Asp (RGD). Gelatin is, therefore, always cationized to enhance the polymer's ability to bind with negatively charged DNA or cellular membranes for effective gene delivery. Polyethyleneimine, cholamine, ethylenediamine (EDA), putrescine, and spermidine are commonly used to introduce amine residues to the carboxyl groups of gelatin, in order to create cationized gelatin. Protamine is a small polycationic peptide consisting of 50-110 amino acids, with a molecular weight of 4000-5000 Da. Due to electrostatic interactions between the positively charged protamine and the negatively charged nucleic acid-phosphate backbone, it binds to DNA. The basic amino acid in monoprotamines is arginine, while diprotamines also include lysine or histidine, and triprotamines have all three. By adjusting the concentration of salt, the ratio of protamine to RNA, and the concentration of the complex, it is possible to generate particles with average diameters specifically ranging from 50 nanometers (nm) to 1000 nm for different delivery needs.

### Payloads

[0476] The present disclosure provides AAV-ITR based gene delivery systems comprising an AAV-ITR vector comprising a gene of interest (GOI) and a Rep vector. In some aspects, the AAV-ITR vector and/or Rep vector of an AAV-ITR based gene delivery system of the present disclosure are encapsulated in a lipidic delivery system (e.g., a LNP or a liposome). As used herein, the term “payload” can refer to a “gene of interest” or “GOI,” i.e., a biologically active molecule encoded by a double stranded DNA inserted in the AAV-ITR vector component of an AAV-ITR based gene delivery system of the present disclosure.

[0477] The term “payload” also refers to biologically active molecules (e.g., small molecule drugs) that can be co-encapsulated with an AAV-ITR vector and/or Rep vector in their respective lipidic delivery systems. Additionally, the term “payload” also refers to biologically active molecules (e.g., targeting molecules such as an antibodies) that are attached or incorporated to a lipid bilayer of a lipidic delivery system of an AAV-ITR based gene delivery system of the present disclosure.

[0478] Non-limiting examples of payloads that can be used in the AAV-ITR based gene delivery systems include therapeutic agents such as, nucleotides (e.g., therapeutic nucleotides or nucleotides comprising a detectable moiety), nucleic acids (e.g., DNA or mRNA molecules that encode a polypeptide such as an enzyme, or RNA molecules that have regulatory function such as miRNA, dsDNA, lncRNA, and siRNA), amino acids (e.g., amino acids comprising a detectable moiety), polypeptides (e.g., enzymes), lipids, carbohydrates, and small molecules (e.g., small molecule drugs and toxins). In certain aspects, a payload comprises an antigen or a nucleic acid (e.g., an mRNA) encoding an antigen. As used herein, the term “antigen” refers to any agent that when introduced into a subject elicits an immune response (cellular or humoral) to itself. In some aspects, the antigen is used to elicit an immune response, i.e., as a vaccine, e.g., in a cancer vaccine. In other aspects, a payload comprises an adjuvant.

[0479] The delivery systems of the present disclosure can be used to deliver a variety of payload, e.g., therapeutic agents, detectable labels, and cell penetrating payloads. In some aspects, the payloads are encoded by a polynucleotide encoding a biologically active molecule of interest (i.e., a GOI) such as, e.g., an enzyme, vaccine antigen, antibody, CAR, etc. In some aspects, the payload is encapsulated in a lipidic delivery system, e.g., a liposome encapsulating an AAV-ITR vector, or a liposome encapsulating a Rep vector. In other aspects, the payload can be covalently or non-covalently linked to the external surface or interior of a lipidic delivery system, e.g., to the internal membrane or internal surface of a liposome encapsulating an AAV-ITR vector, or a liposome encapsulating a Rep vector. In some aspect, a payload can be attached to a liposome encapsulating an AAV-ITR vector, or to a liposome encapsulating a Rep vector of the present disclosure via a linker, for example, cleavable linker.

[0480] In some aspects of the present disclosure, the payload comprises a polypeptide, a peptide, a polynucleotide, a chemical compound, or any combination thereof. In some aspects, an AAV-ITR based gene delivery system of the present disclosure can comprise a single payload, e.g., a polynucleotide encoding a GOI in the AAV-ITR vector. In other aspects, an AAV-ITR based gene delivery system of the present disclosure can comprise multiple payloads, e.g., one or more co-encapsulated small molecules (e.g., a molecule encapsulated in a liposome that also contains an AAV-ITR vector or a Rep vector), one or more targeting moieties (e.g., one or more targeting antibodies capable of directing the AAV-ITR based gene delivery system to a specific target cell) attached to the surface of a liposome, or a combination thereof.

[0481] In some aspects, the payload is a detectable substance. Detectable substances include, but are not limited to, various organic small molecules, inorganic compounds, nanoparticles, enzymes or enzyme substrates, fluorescent materials, luminescent materials, bioluminescent materials, chemiluminescent materials, radioactive materials, and contrast agents. Labels are contemplated by the present disclosure, including, but not limited to, optically detectable labels. Labels can be attached to a vector (e.g., AAV-ITR vector or Rep vector) in an AAV-ITR based gene delivery system of the present disclosure, encoded by a vector (e.g., AAV-ITR vector) in an AAV-ITR based gene delivery system of the present disclosure, attached to another payload of the present disclosure, e.g., targeting molecule on the surface of a liposome, attached to a lipid in a lipidic delivery system component of an AAV-ITR based gene delivery system of the present disclosure, or any combination thereof. In some aspects, the detectable label is attached using standard chemistries such that the label can be removed upon cleavage of a cleavable linker. A detectable label can useful in therapeutic, diagnostic, imaging (e.g., radioimaging), or basic research applications.

[0482] In some aspects, the detectable label is a radioactive label. Examples of a radioactive label include, but are not limited to, the isotopes 3H, 14C, 32P, 35S, 36Cl, 51Cr, 57Co, 58Co, 59Fe, 90Y, 121I, 124I, 125I, 131I, 111In, 117Lu, 211At, 198Au, 67Cu, 225Ac, 213Bi, 99Tc, 186Re and 89Zr.

[0483] In some aspects, the detectable label is a chemiluminescent label, fluorescent label, enzyme, biotin, or a combination thereof. In some aspects, the detectable label is a peptide tag. In some aspects, the detectable label is a polyhistidine tag, polyarginine tag, glutathione-S-transferase (GST), maltose binding protein (MBP), chitin binding protein (CBP), Strep-tag, thioredoxin (TRX), poly(NANP), FLAG tag, ALFA-tag, V5-tag, Myc-tag, hemagglutinin (HA) tag, Spot tag, T7 tag, NE tag, or green fluorescence protein (GFP), or a combination thereof. In some aspects, the polyhistidine tag consists of from about 4 to about 10 histidine residues. In some aspects, the polyhistidine tag consists of about 4, about 5, about 6, about 7, about 8, about 9, or about 10 histidine residues. Additional examples of detectable labels and methods for introducing detectable labels into a polypeptide or polynucleotide are known and include routine chemical, molecular biology and recombinant DNA techniques. See, e.g., Hnatowich et al., Science, 220(4597):613-615, 1983; Yao et al., Int. J. Mol. Sci., 17(2):194, 2016; Kimple et al., Curr. Protoc. Protein Sci., 73:Unit 9.9, 2013; Sambrook J, Fritsch E F. Molecular Cloning: A Laboratory Manual. Cold Spring Harbor Laboratory Press; Cold Spring Harbor, N.Y.: 1989; Molecular Cell Biology, 4th edition, Section 3.5, Purifying, Detecting and Characterizing Proteins; and Mahmoodi et al., Cogent Biology, 5(1):DOI: 10/1080/23312025.2019.1665406.

[0484] In some aspects, the payload comprises a therapeutic small molecule. In some aspects, the small molecule is a proteolysis-targeting chimera (PROTAC). In some aspects, the small molecule is a nucleotide. In some aspects, the nucleotide is a stimulator of interferon genes protein (STING) agonist.

[0485] In some aspects, the payload comprises, consists or consists essentially of a polynucleotide. In some aspects, the polynucleotide is a double stranded DNA encoding a GOI, mRNA, an antisense oligonucleotide (ASO), a phosphorodiamidate morpholino oligonucleotide (PMO), a siRNA, a miRNA, a shRNA, a plasmid, or a vector.

I.B.viii Encapsulation Efficacy and Lipid: Vector Ratios

[0486] In some aspects, the encapsulation efficiency of a vector (e.g., a dsDNA vector such as an AAV ITR vector or a mRNA vector such as an Rep vector) in a lipidic delivery system of the present disclosure (e.g., a LNP or liposome) is 95±5%. In some aspects, the encapsulation efficiency is about 100%. In some aspects, the encapsulation efficiency is at least about 70%, at least about 75%, at least about 80%, at least about 85%, at least about 90%, at least about 95%, at least about 96%, at least about 97%, at least about 98%, at least about 99%. In some aspects, the encapsulation efficiency is between about 70% and about 75%, between at least about 75% and about 80%, between about 80% and about 85%, between about 85% and about 90%, between about 90% and about 95%, or between about 95% and 100%.

[0487] In some aspects, the ratio of dsDNA and/or mRNA to lipid (w/w) in a lipidic delivery system of the present disclosure (e.g., a LNP or liposome) is between 1:1 and about 1:4. In some aspects, the ratio of dsDNA and/or mRNA to lipid (w/w) in a lipidic delivery system of the present disclosure (e.g., a LNP or liposome) is about 1:1. Thus, in some aspects, the ratio of dsDNA and/or mRNA to lipid (w/w) in a lipidic delivery system of the present disclosure (e.g., a LNP or liposome) can be between about 1 and 4, e.g., about 1.5. In some aspects, such w/w ratio about 1, about 1.5, about 2, about 2.5, about 3, about 3.5, or about 4. In some aspects, such w/w ratio is between about 1 and about 1.5, between about 1.5 and about 2, between about 2 and about 2.5, between about 2.5 and about 3, between about 3 and about 3.5, between about 3.5 and about, between about 1.5 and about 3.5, or between about 2 and about 3.

[0488] In some aspects, the percentage of dsDNA and/or mRNA with respect to lipid (w/w) in a lipidic delivery system of the present disclosure (e.g., a LNP or liposome) is between 0.1% and 10%.

[0489] In some aspects, the percentage of dsDNA and/or mRNA with respect to lipid (w/w) is at least about 0.1%, at least about 0.2%, at least about 0.3%, at least about 0.4%, at least about 0.5%, at least about 0.6%, at least about 0.7%, at least about 0.8%, at least about 0.9%, at least about 1%, at least about 1.25%, at least about 1.5%, at least about 1.75%, at least about 2%, at least about 2.25%, at least about 2.5%, at least about 2.75%, at least about 3%, at least about 3.25%, at least about 3.5%, at least about 3.75%, at least about 4%, at least about 4.25%, at least about 4.5%, at least about 4.75%, at least about 5%, at least about 5.25%, at least about 5.5%, at least about 5.75%, at least about 6%, at least about 60.25%, at least about 6.5%, at least about 60.75%, at least about 7%, at least about 7.25%, at least about 7.5%, at least about 7.75%, at least about 8%, at least about 8.25%, at least about 8.5%, at least about 8.75%, at least about 9%, at least about 9.25%, at least about 9.5%, at least about 9.75%, or at least about 10%.

[0490] In some aspects, the percentage of dsDNA and/or mRNA with respect to lipid (w/w) is about 0.1%, about 0.2%, about 0.3%, about 0.4%, about 0.5%, about 0.6%, about 0.7%, about 0.8%, about 0.9%, about 1%, about 1.25%, about 1.5%, about 1.75%, about 2%, about 2.25%, about 2.5%, about 2.75%, about 3%, about 3.25%, about 3.5%, about 3.75%, about 4%, about 4.25%, about 4.5%, about 4.75%, about 5%, about 5.25%, about 5.5%, about 5.75%, about 6%, about 6.25%, about 6.5%, about 6.75%, about 7%, about 7.25%, about 7.5%, about 7.75%, about 8%, about 8.25%, about 8.5%, about 8.75%, about 9%, about 9.25%, about 9.5%, about 9.75%, or about 10%.

Payload: dsDNA for Gene Therapy

[0491] In some aspects, the payload of the AAV-ITR based gene delivery system of the present disclosure comprises a dsDNA in the AAV-ITR vector encoding a gene of interest. Upon integration into the genome of a target cell or host cell, the dsDNA is transcribed to an mRNA that encodes a protein of interest, e.g., an antibody or a CAR. In some aspects, the dsDNA encodes a viral, bacterial, or protozoan protein or fragment or variant thereof, e.g., a vaccine to treat, e.g., COVID-19 (SARS-CoV2 infection), HIV infection, influenza, RSV infection, rabies, HPV infection, malaria, EBV infection, tuberculosis, CMV infection, Herpes zoster, Zika virus infection, HBV infection, yellow fever, PIV infection, hMPV infection, rotavirus infection, Nipah virus infection or Chikungunya virus infection. In some aspects, the dsDNA encodes a neutralizing antibody to treat, e.g., COVID-19 (SARS-CoV2 infection), HIV infection, influenza, RSV infection, rabies, HPV infection, malaria, EBV infection, tuberculosis, CMV infection, Herpes zoster, Zika virus infection, HBV infection, yellow fever, PIV infection, hMPV infection, rotavirus infection, Nipah virus infection or Chikungunya virus infection.

[0492] In some aspects, the dsDNA encodes one or more components of gene editing system. In some aspects, the dsDNA encodes a vaccine for the treatment of cancer, e.g., melanoma, NSCLC, cervical cancer, breast cancer, ovarian cancer, liver cancer, gastric cancer, pancreatic cancer, colorectal cancer, bladder cancer, prostate cancer, head and neck cancer, adenoidcystic carcinoma, cSCC, basal cell cancer, renal cell cancer, or AML, In some aspects, the vaccine for the treatment of cancer is a personal vaccine.

[0493] In some aspects, the dsDNA encodes a CAR (see below). In some aspects, the dsDNA encodes an antibody or antigen-binding portion thereof. In some aspects, the dsDNA encodes an antibody disclosed below or an antigen-binding portion thereof (e.g., the antigen-binding portion of a CAR). In some aspects, the dsDNA encodes a protein for protein replacement therapy. In some aspects, the dsDNA encodes a component of the CRISPR/Cas nuclease system.

[0494] In some aspects, the dsDNA encodes a protein for protein replacement therapy in genetic diseases such as cystic fibrosis, propionic academia, methylmalonic academia, CSD1a, phenylketonuria, CN-1, OTC, or hemophilia. In some aspects, the mRNA encodes a protein for protein replacement therapy in autoimmune disorders. In some aspects, the dsDNA encodes a protein for protein replacement therapy in metabolic disorders, e.g., type 2 diabetes. In some aspects, the dsDNA encodes a protein for protein replacement therapy in cardiovascular disease, e.g., hypercholesterolemia or myocardial ischemia. In some aspects, the dsRNA encodes a protein for protein replacement therapy in fibrosis, e.g., hypertropic scarring, liver fibrosis, lung fibrosis, anemia, or primary sclerosing cholangitis. See Qin et al (2022) Signal Transduction and Targeted Therapy 7:166; Huang et al. (2022) Nature Medicine 28:2273-2287; and Liu et al. (2022) Nature Reviews Cancer 23:526-543, which are herein incorporated by reference in their entireties.

[0495] In some aspects, the protein for gene replacement therapy is selected from the group consisting of AAT, ABCB4, ACADVL, ARG1, ATP8B1, C2, CFTR, citrin, CNTF, CPS1, CTNS, G6PT1, GALT, GLA, HPRT, JAG1, LPL, MCAD, MCM, PBGD, REP1, RPE65, RS1, and TTR.

TABLE 7
Exemplary genes and diseases for gene replacement therapy/

| | | | | Protein | DNA |
|---|---|---|---|---|---|
| | | | Replacement | sequence | sequence |
| Disease | Target | | protein | SEQ ID NO | SEQ ID NO |
| MMA | MCM | methylmalonyl Coenzyme | I671V | 424 | 425 |
| | | A mutase | | | |
| Argininemia | ARG1 | arginase-1 | wt, isoform 1 | 426 | 427 |
| Argininemia | ARG1 | arginase-1 | wt, isoform 2 | 428 | 429 |
| Porphyria | PBGD | porphobilinogen deaminase | wt, isoform 1 | 430 | 431 |
| Porphyria | PBGD | porphobilinogen deaminase | wt, isoform 2 | 432 | 433 |
| Porphyria | PBGD | porphobilinogen deaminase | wt, isoform 3 | 434 | 435 |
| Porphyria | PBGD | porphobilinogen deaminase | wt, isoform 4 | 436 | 437 |
| Porphyria | PBGD | porphobilinogen deaminase | I291M/N340S | 438 | 439 |
| | GoF | | | | |
| Porphyria | ApoA1- | ApoA1-PBGD fusion | ApoA1 fusion | 440 | 441 |
| | PBGD | | | | |
| PFIC3 | ABCB4 | phosphatidylcholine | wt, isoform 1 | 442 | 443 |
| | | translocator ABCB4 | | | |
| PFIC3 | ABCB4 | phosphatidylcholine | wt, isoform 2 | 444 | 445 |
| | | translocator ABCB4 | | | |
| Galactosemia | GALT | galactose-1-phosphate | wt, isoform 1 | 446 | 447 |
| | | uridylyltransferase | | | |
| Galactosemia | GALT | galactose-1-phosphate | wt, isoform 2 | 448 | 449 |
| | | uridylyltransferase | | | |
| CTLN2 | Citrin | citrin | wt, isoform 1 | 450 | 451 |
| CTLN2 | citrin | citrin | wt, isoform 2 | 452 | 453 |
| CTLN2 | GPD | glycerol-3-phosphate | wt | 454 | 455 |
| | | dehydrogenase | | | |
| Retinoschisis | RS1 | retinoschisin 1 | wt | 456 | 457 |
| Retinoschisis | RS1 | retinoschisin 1 | W96R | 458 | 459 |
| C2 deficiency | C2 | complement component C2 | wt | 460 | 461 |
| Aligille | JAG1 | Jagged-1 | wt | 462 | 463 |
| Aligille | JAG1 | Jagged-1 | 1-1054 | 464 | 465 |
| Aligille | JAG1 | Jagged-1 | 1-1046 | 466 | 467 |
| Aligille | JAG1 | Jagged-1 | peptide + Fc | 468 | 469 |
| | | | fusion | | |
| Aligille | JAG1 | Jagged-1 | Fc + peptide | 470 | 471 |
| | | | fusion | | |
| Cystinosis | CTNS | cystinosin | wt, isoform 1 | 472 | 473 |
| Cystinosis | CTNS | cystinosin | wt, isoform 2 | 474 | 475 |
| FLLD | LPL | lipoprotein lipase | wt | 476 | 477 |
| FLLD | LPL-stop | lipoprotein lipase | S447Stop | 478 | 479 |
| FAP | TTR | transthyretin | T119M | 480 | 481 |
| Lesch Nyhan | HPRT | hypoxanthine | wt | 482 | 483 |
| | | phosphoribosyltransferase 1 | | | |
| AAT deficiency | AAT | alpha1-antitrypsin | wt | 484 | 485 |
| CPS1D | CPS1 | carbamoyl phosphate | wt | 486 | 487 |
| | | synthase 1 | | | |
| MCADD | MCAD | medium-chain specific acyl- | wt, isoform 1 | 488 | 489 |
| | | CoA dehydrogenase | | | |
| MCADD | MCAD | medium-chain specific acyl- | wt, isoform 2 | 490 | 491 |
| | | CoA dehydrogenase | | | |
| VLCAD | ACADVL | very long-chain specific | wt, isoform 1 | 492 | 493 |
| | | acyl-CoA dehydrogenase | | | |
| VLCAD | ACADVL | very long-chain specific | wt, isoform 2 | 494 | 495 |
| | | acyl-CoA dehydrogenase | | | |
| VLCAD | ACADVL | very long-chain specific | wt, isoform 3 | 496 | 497 |
| | | acyl-CoA dehydrogenase | | | |
| Fabry | GLA | alpha-galactosidase A | wt | 498 | 499 |
| Choroideremia | CNTF | ciliary neurotrophic factor | wt | 500 | 501 |
| Retinisis | REP1 | Rab escort protein 1 | wt | 502 | 503 |
| pigmentosa | | | | | |
| Retinisis | RPE65 | retinal pigment epithelium- | wt | 504 | 505 |
| pigmentosa | | specific protein 65 kDa | | | |
| PFIC1 | ATP8B1 | ATPase, | wt | 506 | 507 |
| | | aminophospholipid | | | |
| | | transporter, class I, type 8B, | | | |
| | | member 1 | | | |
| GSD1b | G6PT1 | glucose-6-phosphate | wt, isoform 1 | 508 | 509 |
| | | translocase | | | |
| GSD1b | G6PT1 | glucose-6-phosphate | wt, isoform 2 | 510 | 511 |
| | | translocase | | | |

[0496] In some aspects, the dsDNA encodes a gene for the treatment of type 1 diabetes. In some aspects, the dsDNA encodes GLP-1 (glucagon-like peptide 1). In some aspects, the dsDNA encodes GIP (glucose-dependent insulinotropic polypeptide). In some aspects, the dsDNA encodes a modified GLP-1 gene. In some aspects, the modified GLP-1 is a modified GLP-1 (7-37) cDNA, In some aspect, the dsDNA encodes a GLP-1 agonist. In some aspects, the GLP-1 agonist is exendin-4. In some aspects, the GLP-1 is a GLP-1 fusion protein. In some aspects, the GLP-1 fusion protein is a GLP-1/Fc fusion protein. In some aspects, the exendin-4 is an exendin-4 peptide. In some aspects, the exendin-4 is an exendin-4 fusion protein. In some aspects, the exendin-4 fusion protein is an exendin-4/Fc fusion protein. In some aspects, the GLP-1 agonist is selected from the group consisting of exenatide, liraglutide, lixisenative, taspoglutide, albiglutide, dulaglutide, emaglutide, and semaglutide. See A. Palani et al. 7.12—GLP-1 Receptor Agonists for the Treatment of Diabetes and Obesity, Editor: Chackalamannil et al. Comprehensive Medicinal Chemistry III, Elsevier, 2017, pages 481-490; Dowarah et al. Anti-diabetic drugs recent approaches and advancements, Bioorganic & Medicinal Chemistry, 2020, 28(5):115263; and Deng et al. Drug discovery approaches targeting the incretin pathway, Bioorganic Chemistry, 2020, 99: 103810, which are herein incorporated by references in their entireties.

TABLE 8
Sequences of GLP-1 and agonists. The sequences shown correspond
to GLP-1 (SEQ ID NO: 512), exenatide (SEQ ID NO: 513),
liraglutide (SEQ ID NO: 514), lixisenatide (SEQ ID NO: 515),
taspoglutide (SEQ ID NO: 516), albiglutide (SEQ ID NO:517),
dulaglutide (SEQ ID NO: 518), and semaglutide (SEQ ID NO: 519).

| | |
|---|---|
| GLP-1: | H¹AEGT⁵FTSDV¹⁰SSYLE¹⁵GQAAK²⁰EFIAW²⁵LVKGR³⁰ [symbol] NH₂ |
| Exenatide: | [chemical structure] |
| Liraglutide: | [chemical structure] |
| Lixisenatide | [chemical structure] |
| Taspoglutide | HUEGTFTSDVSSYLEGQAAKEFIAWLVKUR-NH₂ |
| Albiglutide | [HGEGTFTSDVSSYLEGQAAKEFIAWLVKGR]₂-Albumin |
| Dulaglutide | [HGEGTFTSDVSSYLEEQAAKEFIAWLVKGG-linker]₂-IgG4 Fc domain |
| Semaglutide | HUEGTFTSDVSSYLEGQAAK(PEG2PEG2γEC18OH)EFIAWLVRGRG |

[symbol]

indicates data missing or illegible when filed

In some aspects, the dsDNA encodes a therapy for type 2 diabetes. Genetic association studies have identified at least 75 independent genetic loci for T2DM and various new therapeutic targets have been determined. For example, three novel mutations in gene KCNJ11 are associated with the development of autosomal dominant, early-onset T2DM. Contrasting with their limited effects on disease incidence and development, genetic loci can have much stronger effects on drug response. A large number of genetic polymorphisms affect the response to oral anti-diabetic drugs. Genes encoding SLC2A2 and organic cation transporters (OCT1, OCT2, and OCT3) are associated with glycemic response to metformin, while SLCO1B3 and KCNQ are associated with sulfonylureas response. There are several genetic loci with potential for T2DM gene therapy. One good example is nucleotide-binding oligomerization domain-like receptor protein 3 (NLRP3). Inhibition of gene NLRP3 attenuates inflammation, protects pancreatic j-cells from apoptosis, and prevents T2DM development in mice. See Yue et al. (2019) Advances and potential of gene therapy for type 2 diabetes mellitus, Biotechnology & Biotechnological Equipment, 33:1, 1150-1157, which is herein incorporated by reference in its entirety.

TABLE 9
Potential targets for type 2 diabetes gene therapy.

| Class | Gene(s) | Main function |
|---|---|---|
| Genes | GLUTs | Re-absorption of filtered glucose from the kidney |
| regulating | | into the bloodstream |
| glucose | SGLTs | Play a fundamental role in the muscle and liver |
| homeostasis | | glucose fluxes |
| | FGFs | Play significant roles in glucose homeostasis |
| | SIRT6 | Associated with increased glycolysis and GLUTs |
| | | expression |
| Genes | GLP-1 and its analogs/agnoists | Increase beta-cell survival, stimulate insulin gene |
| improving | | expression, and secretion |
| insulin | GPGRs and their agonists | Stimulate insulin and GLP-1 secretion |
| secretion | | |
| and/or | CTB-APSL | Promotes insulin secretion and insulin resistance |
| sensitivity | IKK ε, TBK1 | Associated with weight reduction, insulin |
| | | resistance, fatty liver, and inflammation |
| Genes | IL-1β | Associated with inflammation and Î²-cell failure |
| ameliorating | ADPN | Ameliorates diabetic nephropathy |
| diabetic | TGF-α | Plays a role in DKD associated with nephron |
| induced | | reduction |
| complications | NLRP3 | Ameliorates diabetic cardiomypathy |
| | CDKN2A/2B | Associated with T-cell phenotype modulation and |
| | | chronic inflammation |
| | HSP70 | Associated with mitochondrial bioenergetics and |
| | | diabetic sensory neuropathy |
| | MicroRNAs | Involved in regulating the diabetic |
| | | microvasculature |

SGLTs, sodium-glucose co-transporters; GLUTs, glucose transporters; FGFs, fibroblast growth factors; SIRT6, Sirtuin 6; GLP-1, glycogen like peptide 1; GPGRs, G protein-coupled receptors; CTB-APSL, cholera toxin B subunit and active peptide from shark liver; ADPN, adiponectin; TGF-α, transforming growth factor-alpha; NLRP3, nucleotide-binding oligomerization domain-like receptor protein 3; DKD, diabetic kidney disease; HSP70, heat shock protein 70.

[0497] In some aspects, the dsDNA encodes a gene for the treatment of lipoprotein lipase deficiency. In some aspects, the dsDNA encodes the GOI in alipogene tiparvovec (GLYBERA™).

[0498] In some aspects, the dsDNA encodes a gene for the treatment of metachromatic leukodystrophy. In some aspects, the dsDNA encodes the GOI in atidarsagene autotemcel (LIBMELDY™). In some aspects, the dsDNA encodes a gene for the treatment of B-cell lymphoma. In some aspects, the dsDNA encodes the GOI in axicabtagene ciloleucel (YESCARTA™). In some aspects, the dsDNA encodes a gene for the treatment of wounds or Dystrophic epidermolysis bullosa (DEB). In some aspects, the dsDNA encodes the GOI in beremagene geperpavec (VYJUVEK™). In some aspects, the dsDNA encodes a gene for the treatment beta thalassemia. In some aspects, the dsDNA encodes the GOI in betibeglogene autotemcel (ZYNTEGLO™). In some aspects, the dsDNA encodes a gene for the treatment of mantle cell lymphoma or acute lymphoblastic leukemia. In some aspects, the dsDNA encodes the GOI in brexucabtagene autoleucel (TECARTUS™). In some aspects, the dsDNA encodes a gene for the treatment of vascular endothelial growth factor peripheral artery disease. In some aspects, the dsDNA encodes the GOI in cambiogenplasmid (NEOVASCULGEN™). In some aspects, the dsDNA encodes a gene for the treatment multiple myeloma. In some aspects, the dsDNA encodes the GOI in ciltacabtagene autoleucel (CARVYKTI™). In some aspects, the dsDNA encodes a gene for the treatment of Duchenne muscular dystrophy. In some aspects, the dsDNA encodes the GOI in delandistrogene moxeparvovec (ELEVIDYS™). In some aspects, the dsDNA encodes a gene for the treatment of adrenoleukodystrophy. In some aspects, the dsDNA encodes the GOI in elivaldogene autotemcel (SKYSONA™). In some aspects, the dsDNA encodes a gene for the treatment of hemophilia B. In some aspects, the dsDNA encodes the GOI in etranacogene dezaparvovec (HEMGENIX™). In some aspects, the dsDNA encodes a gene for the treatment of head and neck squamous cell carcinoma. In some aspects, the dsDNA encodes the GOI in gendicine. In some aspects, the dsDNA encodes a gene for the treatment of multiple myeloma. In some aspects, the dsDNA encodes the GOI in idecabtagene vicleucel (ABECMA™). In some aspects, the dsDNA encodes a gene for the treatment of B-cell lymphoma. In some aspects, the dsDNA encodes the GOI in lisocabtagene maraleucel (BREYANZI™). In some aspects, the dsDNA encodes a gene for the treatment of bladder cancer. In some aspects, the dsDNA encodes the GOI in nadofaragene firadenovec (ADSTILADRIN™). In some aspects, the dsDNA encodes a gene for the treatment of spinal muscular atrophy. In some aspects, the dsDNA encodes the GOI in onasemnogene abeparvovec (ZOLGENSMA™). In some aspects, the dsDNA encodes a gene for the treatment of adenosine deaminase deficiency (ADA-SCID). In some aspects, the dsDNA encodes the human enzyme adenosine deaminase (ADA) GOI in strimvelis (autologous CD34+). In some aspects, the dsDNA encodes a gene for the treatment of melanoma in patients who have recurring skin lesions. In some aspects, the dsDNA encodes the GOI in talimogene laherparepvec (IMLYGIC™). In some aspects, the dsDNA encodes a gene for the treatment of B cell lymphoblastic leukemia. In some aspects, the dsDNA encodes the GOI in tisagenlecleucel (KYMRIAH™). In some aspects, the dsDNA encodes a gene for the treatment of hemophilia A. In some aspects, the dsDNA encodes the GOI in valoctocogene roxaparvovec (ROCTAVIAN™) In some aspects, the dsDNA encodes a gene for the treatment of Leber congenital amaurosis. In some aspects, the dsDNA encodes the GOI in voretigene neparvovec (LUXTURNA™).

### Payload: Chimeric Antigen Receptor (CARs)

[0499] In some aspects the payload comprises a CAR (e.g., integrated into the lipid bilayer of a lipidic delivery system component of an AAV-ITR based gene delivery system of the present disclosure) or polynucleotide encoding a CAR (e.g., a dsDNA polynucleotide in the AAV-ITR vector).

[0500] As used herein, the term “Chimeric Antigen Receptor” or alternatively a “CAR” refers to a recombinant polypeptide construct comprising at least an extracellular antigen binding domain, a transmembrane domain, and a cytoplasmic signaling domain comprising a functional signaling domain derived from a stimulatory molecule. In one aspect, the stimulatory molecule is the zeta chain associated with the T cell receptor complex. In one aspect, the cytoplasmic signaling domain further comprises one or more functional signaling domains derived from at least one costimulatory molecule as defined below. In one aspect, the costimulatory molecule is chosen from 4-1BB (i.e., CD137), CD3, and/or CD28.

[0501] In one aspect, the CAR comprises a chimeric fusion protein comprising an extracellular antigen recognition domain, a transmembrane domain, and an intracellular signaling domain comprising a functional signaling domain derived from a stimulatory molecule. In one aspect, the CAR comprises a chimeric fusion protein comprising an extracellular antigen recognition domain, a transmembrane domain and an intracellular signaling domain comprising a functional signaling domain derived from a co-stimulatory molecule and a functional signaling domain derived from a stimulatory molecule. In one aspect, the CAR comprises a chimeric fusion protein comprising an extracellular antigen recognition domain, a transmembrane domain and an intracellular signaling domain comprising two functional signaling domains derived from one or more co-stimulatory molecule(s) and a functional signaling domain derived from a stimulatory molecule.

[0502] In one aspect, the CAR comprises a chimeric fusion protein comprising an extracellular antigen recognition domain, a transmembrane domain and an intracellular signaling domain comprising at least two functional signaling domains derived from one or more co-stimulatory molecule(s) and a functional signaling domain derived from a stimulatory molecule. In one aspect the CAR comprises an optional leader sequence at the amino-terminus (N-ter) of the CAR fusion protein. In one aspect, the CAR further comprises a leader sequence at the N-terminus of the extracellular antigen recognition domain, wherein the leader sequence is optionally cleaved from the scFv domain during cellular processing and localization of the CAR to the cellular membrane.

[0503] The portion of the CAR composition comprising an antibody or antibody fragment thereof can exist in a variety of forms where the antigen binding domain is expressed as part of a contiguous polypeptide chain including, for example, a single domain antibody fragment (sdAb), a single chain antibody (scFv) and a humanized antibody (Harlow et al., 1999, In: Using Antibodies: A Laboratory Manual, Cold Spring Harbor Laboratory Press, NY; Harlow et al., 1989, In: Antibodies: A Laboratory Manual, Cold Spring Harbor, N.Y.; Houston et al., 1988, Proc. Natl. Acad. Sci. USA 85:5879-5883; Bird et al., 1988, Science 242:423-426). In one aspect, the antigen-binding domain of a CAR composition disclosed herein comprises an antibody fragment. In one aspect, the CAR comprises an antibody fragment that comprises a scFv.

[0504] In some aspects, the CAR comprises an extracellular antigen recognition domain comprising an antibody disclosed herein or an antigen-binding portion thereof. In some aspects, the extracellular antigen recognition domain comprises a scFv derived from an antibody disclosed herein. In some aspects, the extracellular antigen recognition domain comprises an antibody in a format disclosed in the present application.

[0505] In some aspects, the CAR is tisagenlecleucel (KYMRIAH®), an anti-CD19 CAR for the treatment of B-cell precursor ALL, diffuse large B-cell lymphoma, or follicular lymphoma. In some aspects, the CAR is axicabtagene ciloleucel (YESCARTA®), an anti-CD19 CAR for the treatment of diffuse large B-cell lymphoma and follicular lymphoma. In some aspects, the CAR is brexucabtagene autoleucel (TECARTUS®) an anti-CD19 CAR for the treatment of mantle cell lymphoma and B-cell precursor ALL. In some aspects, the CAR is lisocabtagene maraleucel (BREYANZI®) an anti-CD19 CAR for the treatment of diffuse large B-cell lymphoma. In some aspects, the CAR is idecabtagene vicleucel (ABECMA®) an anti-BCMA CAR for the treatment of multiple myeloma. In some aspects, the CAR is ciltacabtagene autoleucel (CARVYKTI®) an anti-BCMA CAR for the treatment of multiple myeloma.

[0506] In some aspects the payload comprises a CAR or polynucleotide encoding a CAR wherein the CAR's binding portion is an anti-CD19, anti-BCMA, anti-HER2, anti-CD20, anti-CD22, anti-IL13Ra2, anti-GPC3, or combination thereof. In some aspects the payload comprises a CAR or polynucleotide encoding a CAR wherein the CAR's binding portion comprises a scFv derived from a therapeutic antibody disclosed herein, e.g., a therapeutic antibody disclosed herein targeting an antigen expressed on the surface of T cells. In some aspects, the CAR is a monospecific CAR. In some aspects, the CAR is a bispecific CAR.

[0507] In some aspects, the payload comprises a polynucleotide encoding a CAR disclosed in the following table. Thus, in some aspects, the AAV-ITR vector comprises a coding sequence encoding a CAR disclosed in the following table.

TABLE 10
Exemplary CAR sequences. When two chains are present the first SEQ ID
NO correspondence to the top protein chain and the second SEQ ID NO
corresponds to the bottom protein chain in the protein sequence cell.

| SEQ ID | |
|---|---|
| NO | CAR name |
| 520 | acmucabtagene autoleucel |
| 521 | anbalcabtagene autoleucel |
| 522 | axicabtagene ciloleucel YESCARTA ® |
| 523 | azercabtagene zapreleucel |
| 524 | brexucabtagene autoleucel TECARTUS ™ |
| 525 | cemacabtagene ansegedleucel |
| 526 | evoncabtagene pazurgedleucel |
| 527 | inaticabtagene autoleucel |
| 528 | lisocabtagene maraleucel BREYANZI ™ |
| 529 | obecabtagene autoleucel |
| 530 | anitocabtagene autoleucel |
| 531 | ciltacabtagene autoleucel CARVYKTI ™ |
| 532 | durcabtagene autoleucel |
| 533 | equecabtagene autoleucel |
| 534 | fencabtagene autoleucel |
| 535 | firicabtagene autoleucel |
| 536 | gavocabtagene autoleucel |
| 537 | idecabtagene vicleucel |
| 538 | itezocabtagene autoleucel |
| 539 | motacabtagene lurevgedleucel |
| 540 | obecabtagene autoleucel |
| 541 | orvacabtagene autoleucel |
| 542 | plixacabtagene autoleucel |
| 543 | pomlucabtagene autoleucel |
| 544 | prizloncabtagene autoleucel |
| 545 | rapcabtagene autoleucel |
| 546 | relmacabtagene autoleucel |
| 547 | ribrecabtagene autoleucel |
| 548 | satricabtagene autoleucel |
| 549 | tebrocabtagene autoleucel |
| 550 | tinocabtagene autoleucel |
| 551/552 | trovocabtagene autoleucel. Comprises two chains that can be in separate AAV-ITR |
| | vectors or in an bicistronic AAV-ITR vector. 1:1 ratio |
| 553/554 | vadacabtagene leraleucel. Comprises two chains that can be in separate AAV-ITR |
| | vectors or in an bicistronic AAV-ITR vector. 1:1 ratio |
| 555/556 | varnimcabtagene autoleucel. Comprises two chains that can be in separate AAV- |
| | ITR vectors or in an bicistronic AAV-ITR vector. 1:1 ratio |
| 557/558 | volamcabtagene durzigedleucel. Comprises two chains that can be in separate AAV- |
| | ITR vectors or in an bicistronic AAV-ITR vector. 1:1 ratio |
| 559/560 | zamtocabtagene autoleucel. Comprises two chains that can be in separate AAV-ITR |
| | vectors or in an bicistronic AAV-ITR vector. 1:1 ratio |
| 561/562 | zevorcabtagene autoleucel. Comprises two chains that can be in separate AAV-ITR |
| | vectors or in an bicistronic AAV-ITR vector. 1:1 ratio |
| 563 | afamitresgene autoleucel |
| 564 | besvatresgene autoleucel |
| 565 | letetresgene autoleucel |
| 566 | mipetresgene autoleucel |
| 567 | olitresgene autoleucel |
| 568 | suvutresgene autoleucel |
| 569 | tacatresgene autoleucel |
| 570 | tisagenlecleucel |

[0508] In some aspects, the CAR comprises a bispecific antibody covalently linked to the spacer-TM (spacer and transmembrane domain) and intracellular domain portion of a CAR in the table above. In some aspects, the CAR comprises a MSTAR antibody covalently linked to the spacer-TM (spacer and transmembrane domain) and intracellular domain portion of a CAR in the table above.

### Payload: Therapeutic Antibodies

[0509] In some aspects, the payload comprises a polynucleotide in the AAV-ITR vector encoding a therapeutic antibody or an antigen-binding portion thereof, e.g., a therapeutic antibody disclosed below or an antigen-binding portion thereof. In some aspects, the payload comprises a therapeutic antibody or an antigen-binding portion thereof, e.g., a therapeutic antibody disclosed below or an antigen-binding portion thereof, e.g., covalently attached to the surface of a liposome. In some aspects the payload can comprise a polynucleotide in the AAV-ITR vector encoding a fusion protein comprising a therapeutic antibody disclosed below or an antigen-binding portion thereof.

[0510] It is to be noted that the used of the therapeutic antibodies and antigen-binding portions thereof disclose below is not limited to serve as payloads in the delivery systems of the present disclosure, e.g., a polynucleotide encoding an antibody as the GOI is an AAV-ITR vector. Thus, in some aspects, a therapeutic antibody disclosed below or an antigen-binding portion thereof can be or can be part of a surface anchored targeting molecule in the lipidic delivery system of an AAV-ITR based gene delivery system of the present disclosure (e.g., a liposome encapsulating the AAV-ITR vector and/or a liposome encapsulating the Rep vector), and direct the AAV-ITR based gene delivery system of the present disclosure to a cell or tissue expressing the molecule to which an antibody disclosed below binds specifically.

[0511] In some aspects, VH and/or VL domains of antibodies disclosed below can be used as part of the targeting portion of a CAR. In some aspects, a CAR used as payload in a LNP delivery system of the present disclosure can comprise a scFv comprising VH and VL domains from any of the therapeutic antibodies disclosed below.

[0512] In some aspects, the payload comprises an antibody or antigen-binding portion thereof attached to a lipidic delivery system of an AAV-ITR based gene delivery system of the present disclosure, or a polynucleotide in the AAV-ITR encoding an antibody or antigen-binding portion thereof, wherein the antibody is selected from the group consisting of 3F8 (anti-GD2 ganglioside), abagovomab (anti-CA-125), abciximab (anti-CD41, integrin alpha-IIb), abituzumab (anti-CD51), abrezekimab (anti-IL-13), abrilumab (anti-integrin α4β7), actoxumab (anti-Clostridium difficile), adalimumab (anti-TNF-α), adecatumumab (anti-EpCAM), aducanumab (anti-Amyloid beta), afasevikumab (anti-IL-17A, IL-17F), afelimomab (anti-TNF-α), alacizumab pegol VEGFR2), alemtuzumab (anti-CD52), alirocumab (anti-PCSK9), altumomab pentetate (anti-carcinoembryonic antigen (CEA)), amatuximab[(anti-mesothelin), amivantamab (anti-epidermal growth factor receptor (EGFR), cMet), anatumomab mafenatox (anti-tumor-associated glycoprotein 72 (TAG-72)), andecaliximab (anti-gelatinase B), anetumab ravtansine (anti-mesothelin (MSLN)), anifrolumab (anti-IFN-α/β receptor), ansuvimab (anti-Ebola virus glycoprotein), anrukinzumab (anti-IL-13), apolizumab[(anti-HLA-DR), aprutumab ixadotin (anti-FGFR2), arcitumomab (anti-Carcinoembryonic antigen (CEA)), ascrinvacumab (anti-activin receptor-like kinase 1), aselizumab (anti-L-selectin (CD62L)), atezolizumab (anti-PD-L1), atidortoxumab (anti-Staphylococcus aureus alpha toxin), atinumab (anti-RTN4), atorolimumab (anti-Rhesus factor), avelumab (anti-PD-L1), azintuxizumab vedotin (anti-CD319), bamlanivimab (anti-spike protein receptor binding domain (RBD) of SARS-CoV-2), bapineuzumab (anti-β-amyloid), basiliximab (anti-CD25 (α chain of IL-2 receptor)), bavituximab (anti-phosphatidylserine), BCD-100 (anti-PD-1), bebtelovimab (anti-spike protein receptor binding domain (RBD) of SARS-CoV-2), bectumomab (anti-CD22), bedinvetmab (anti-nerve growth factor (NGF)), begelomab (anti-DPP4), belantamab mafodotin (anti-B-cell maturation antigen (BCMA)), belimumab (anti-B-cell activating factor (BAFF)), bemarituzumab (anti-FGFR2), benralizumab[(anti-CD125), berlimatoxumab (anti-Staphylococcus aureus bi-component leucocidin), bermekimab (anti-IL-la), bersanlimab (anti-ICAM-1), bertilimumab (anti-CCL11 (eotaxin-1)), besilesomab (anti-carcinoembryonic antigen (CEA)-related antigen), bevacizumab (anti-VEGF-A), bezlotoxumab[(anti-Clostridium difficile), biciromab (anti-beta chain), bimagrumab (anti-ACVR2B), bimekizumab (anti-IL-17A, IL-17F, IL-17AF), birtamimab (anti-serum amyloid A protein), bivatuzumab (anti-CD44 v6), bleselumab (anti-CD40), blinatumomab (anti-CD19), blontuvetmab (anti-CD20), blosozumab (anti-SOST), bococizumab (anti-PCSK9), brazikumab (anti-IL-23), brentuximab vedotin (anti-CD30 (TNFRSF8)), briakinumab (anti-IL-12, IL-23), brodalumab (anti-IL-17), brolucizumab (anti-vascular endothelial growth factor A (VEGFA)), brontictuzumab (anti-Notch 1), burosumab (anti-FGF 23), cabiralizumab (anti-CSF1R), camidanlumab tesirine (anti-CD25 (α chain of IL-2 receptor), camrelizumab (anti-PD-1), canakinumab (anti-IL-1), cantuzumab mertansine (anti-CanAg (a glycoform of MUC1)), cantuzumab ravtansine (anti-CanAg (α glycoform of MUC1)), caplacizumab (anti-VWF), casirivimab (anti-spike protein receptor binding domain (RBD) of SARS-CoV-2), capromab (anti-Glutamate carboxypeptidase II), carlumab (anti-MCP-1), carotuximab (anti-endoglin), catumaxomab (anti-EpCAM, CD3), cBR96-doxorubicin immunoconjugate (anti-Lewis-Y antigen), cedelizumab (anti-CD4), cemiplimab (anti-PD-1), cergutuzumab amunaleukin (anti-IL-2), certolizumab pegol (anti-TNF-α), cetrelimab (anti-PD-1), cetuximab (anti-epidermal growth factor receptor (EGFR)), cibisatamab (anti-CEACAM5), cilgavimab (anti-spike protein receptor binding domain (RBD) of SARS-CoV-2), cirmtuzumab (anti-ROR1), citatuzumab bogatox (anti-EpCAM), cixutumumab (anti-IGF-1 receptor (CD221)), clazakizumab (anti-IL-6), clenoliximab (anti-CD4), clivatuzumab tetraxetan (anti-MUC1), codrituzumab (anti-glypican 3), cofetuzumab pelidotin (anti-PTK7), coltuximab ravtansine (anti-CD19), conatumumab (anti-TRAIL-R2), concizumab (anti-tissue factor pathway inhibitor (TFPI)), cosfroviximab (anti-ebolavirus glycoprotein), crenezumab (anti-β-amyloid (1-40 and 1-42)), crizanlizumab (anti-selectin P), crotedumab (anti-glucagon receptor (GCGR)), CR6261 (anti-Hemagglutinin (influenza)), cusatuzumab (anti-CD70), dacetuzumab (anti-CD40), daclizumab (anti-CD25 (α chain of IL-2 receptor), dalotuzumab (anti-IGF-1 receptor (CD221)), dapirolizumab pegol (anti-CD154 (CD40L)), daratumumab (anti-CD38), dectrekumab (anti-IL-13), demcizumab (anti-DLL4), denintuzumab mafodotin (anti-CD19), denosumab (anti-RANKL), depatuxizumab mafodotin (anti-EGFR), derlotuximab biotin (anti-histone complex), detumomab (anti-B-lymphoma cell), dezamizumab (anti-serum amyloid P component), dinutuximab (anti-GD2 ganglioside), dinutuximab beta (anti-GD2 ganglioside), diridavumab (anti-Hemagglutinin (influenza)), domagrozumab (anti-GDF-8), donanemab (anti-Amyloid beta), dostarlimab (anti-PCDP1), drozitumab (anti-DR5), DS-8201 (anti-HER2), duligotuzumab (anti-ERBB3 (HER3)), dupilumab (anti-IL-4Ra), durvalumab (anti-PD-L1), dusigitumab (anti-IGF-2), duvortuxizumab (anti-CD19, CD3E), ecromeximab (anti-GD3 ganglioside), eculizumab (anti-C5), edobacomab (anti-endotoxin), edrecolomab (anti-EpCAM), efalizumab (anti-LFA-1 (CD11a)), efungumab (anti-Hsp90), eldelumab (anti-CXCL10 (IP-10)), elezanumab (anti-repulsive guidance molecule A (RGMA)), elgemtumab (anti-ERBB3 (HER3)), elotuzumab (anti-SLAMF7), elsilimomab (anti-IL-6), emactuzumab (anti-CSF1R), emapalumab (anti-IFN-7), emibetuzumab (anti-HGFR), emicizumab (anti-activated F9, F10), enapotamab vedotin (anti-AXL), enavatuzumab (anti-TWEAK receptor), enfortumab vedotin (anti-nectin-4), enlimomab pegol (anti-ICAM-1 (CD54)), enoblituzumab (anti-CD276), enokizumab (anti-IL-9), enoticumab (anti-DLL4), ensituximab (anti-MUCSAC), epcoritamab (anti-CD3, CD20), epitumomab cituxetan (anti-episialin), epratuzumab (anti-CD22), eptinezumab (anti-calcitonin gene-related peptide), erenumab (anti-calcitonin gene-related peptide receptor (CGRP)), erlizumab (anti-ITGB2 (CD18)), ertumaxomab (anti-HER2/neu, CD3), etaracizumab (anti-integrin avP3), etesevimab (anti-spike protein receptor binding domain (RBD) of SARS-CoV-2), etigilimab (anti-TIGIT), etrolizumab (anti-integrin 07), evinacumab (anti-angiopoietin 3), evolocumab (anti-PCSK9), exbivirumab (anti-hepatitis B surface antigen), fanolesomab (anti-CD15), faralimomab (anti-IFN receptor), faricimab (anti-VEGF-A and Ang-2), farletuzumab (anti-folate receptor 1), fasinumab (anti-nerve growth factor (NGF)), FBTA05 (anti-CD20), felvizumab (anti-respiratory syncytial virus), fezakinumab (anti-IL-22), fibatuzumab (anti-ephrin receptor A3), ficlatuzumab (anti-Hepatocyte growth factor (HGF)), figitumumab (anti-IGF-1 receptor (CD221)), firivumab (anti-Hemagglutinin (influenza)), flanvotumab (anti-TYRP1 (glycoprotein 75)), fletikumab (anti-IL-20), flotetuzumab (anti-IL-3 receptor), fontolizumab (anti-IFN-7), foralumab (anti-CD3E), foravirumab (anti-rabies virus glycoprotein), fremanezumab (anti-calcitonin gene-related peptide alpha and beta), fresolimumab (anti-TGF-β), frovocimab (anti-PCSK9), frunevetmab (anti-nerve growth factor (NGF)), fulranumab (anti-nerve growth factor (NGF)), futuximab (anti-Epidermal growth factor receptor (EGFR)), galcanezumab (anti-calcitonin), galiximab (anti-CD80), gancotamab (anti-HER2/neu), ganitumab (anti-IGF-1 receptor (CD221)), gantenerumab (anti-β-amyloid (1-40 and 1-42)), gatipotuzumab (anti-MUC1), gavilimomab (anti-CD147 (basigin)), gedivumab (anti-Hemagglutinin (influenza)), gemtuzumab ozogamicin (anti-CD33), gevokizumab (anti-IL-1β), gilvetmab (anti-PCDC1), gimsilumab (anti-CSF2), girentuximab (anti-carbonic anhydrase 9 (CA-IX)), glembatumumab vedotin (anti-GPNMB), glofitamab (anti-CD20, CD3), golimumab (anti-TNF-α), gomiliximab (anti-CD23 (IgE receptor), gosuranemab (anti-tau protein), guselkumab (anti-IL-23), ianalumab (anti-BAFF-R), ibalizumab (anti-CD4), sintilimab (anti-PD-1), ibritumomab tiuxetan (anti-CD20), icrucumab (anti-VEGFR-1), idarucizumab (anti-dabigatran), ifabotuzumab (anti-EPHA3), igovomab (anti-CA-125), iladatuzumab vedotin (anti-CD79B), imalumab (anti-macrophage migration inhibitory factor (MIF)), imaprelimab (anti-melanoma cell adhesion molecule (MCAM)), imciromab (anti-cardiac myosin), imdevimab (anti-spike protein receptor binding domain (RBD) of SARS-CoV-2), imgatuzumab (anti-Epidermal growth factor receptor (EGFR)), inclacumab (anti-selectin P), indatuximab ravtansine (anti-SDC1), indusatumab vedotin (anti-GUCY2C), inebilizumab (anti-CD19), infliximab (anti-TNF-α), intetumumab (anti-CD51), inolimomab (anti-CD25 (α chain of IL-2 receptor)), inotuzumab ozogamicin (anti-CD22), ipilimumab (anti-CD152), iomab-B (anti-CD45), iratumumab (anti-CD30 (TNFRSF8)), isatuximab (anti-CD38), iscalimab (anti-CD40), istiratumab (anti-IGF-1 receptor (CD221)), itolizumab (anti-CD6), ixekizumab (anti-IL-17A), keliximab (anti-CD4), labetuzumab (anti-Carcinoembryonic antigen (CEA)), lacnotuzumab (anti-CSF1, macrophage colony stimulating factor (MCSF)), ladiratuzumab vedotin (anti-LIV-1), lampalizumab (anti-Complement factor D (CFD)), lanadelumab (anti-kallikrein), landogrozumab (anti-GDF-8), laprituximab emtansine (anti-epidermal growth factor receptor (EGFR)), larcaviximab (anti-ebolavirus glycoprotein), lebrikizumab (anti-IL-13), lecanemab (anti-β-amyloid), lemalesomab (anti-NCA-90 (granulocyte antigen)), lendalizumab (anti-C5), lenvervimab (anti-hepatitis B surfage antigen), lenzilumab (anti-CSF2), lerdelimumab (anti-TGF-β2), leronlimab (anti-CCR5), lesofavumab (anti-Hemagglutinin (influenza)), letolizumab (anti-tumor necrosis factor related activation protein (TRAP)), lexatumumab (anti-TRAIL-R2), libivirumab (anti-hepatitis B surface antigen), lifastuzumab vedotin (anti-phosphate-sodium co-transporter), ligelizumab (anti-IGHE), loncastuximab tesirine (anti-CD19), losatuxizumab vedotin (anti-EGRF, ERBB1 HER1), lilotomab satetraxetan (anti-CD37), lintuzumab (anti-CD33), lirilumab (anti-KIR2D), lodelcizumab (anti-PCSK9), lorvotuzumab mertansine (anti-CD56), lucatumumab (anti-CD40), lulizumab pegol (anti-CD28), lumiliximab (anti-CD23 (IgE receptor)), lumretuzumab (anti-ERBB3 (HER3)), lupartumab amadotin (anti-LYPD3), lutikizumab (anti-IL-la), mapatumumab (anti-TRAIL-R1), margetuximab (anti-HER2), marstacimab (anti-tissue factor pathway inhibitor (TFPI)), maslimomab (anti-T-cell receptor), mavrilimumab (anti-GMCSF receptor α-chain), matuzumab (anti-epidermal growth factor receptor (EGFR)), mepolizumab (anti-IL-5), metelimumab (anti-TGF-β1), milatuzumab (anti-CD74), minretumomab (anti-TAG-72), mirikizumab (anti-IL-23), mirvetuximab soravtansine (anti-folate receptor alpha), mitumomab (anti-GD3 ganglioside), modotuximab (anti-EGFR extracellular domain III), mogamulizumab (anti-CCR4), monalizumab (anti-NKG2A), morolimumab (anti-Rhesus factor), mosunetuzumab (anti-CD3E, MS4A1, CD20), motavizumab (anti-respiratory syncytial virus), moxetumomab pasudotox (anti-CD22), muromonab-CD3 (anti-CD3), nacolomab tafenatox (anti-C242 antigen), namilumab (anti-CSF2), naptumomab estafenatox (anti-5T4)), naratuximab emtansine (anti-CD37)), narnatumab (anti-MST1R (aka RON)), natalizumab (anti-integrin α4), navicixizumab (anti-DLL4 and VEGFA), navivumab (anti-Hemagglutinin (influenza)), naxitamab (anti-c-Met), nebacumab (anti-endotoxin), necitumumab (anti-epidermal growth factor receptor (EGFR)), nemolizumab (anti-IL-31 receptor A), NEOD001 (anti-amyloid), nerelimomab (anti-TNF-α, nesvacumab (anti-angiopoietin 2), netakimab (anti-IL-17A), nimotuzumab (anti-epidermal growth factor receptor (EGFR)), nirsevimab (anti-RSV fusion glycoprotein), nivolumab (anti-PD-1), nofetumomab merpentan (pancarcinoma murine antibody NR-LU-10 linked with gamma-emitting radioisotope technetium 99m (Tc 99m)), obiltoxaximab (anti-Bacillus anthracis anthrax), obinutuzumab anti-CD20, ocaratuzumab (anti-CD20), ocrelizumab (anti-CD20). atoltivimab/maftivimab/odesivimab (INMAZEB®, REGN-EB3) (anti-Zaire ebolavirus glycoprotein combination therapy), odulimomab (anti-LFA-1 (CD11a)), ofatumumab (anti-CD20), olaratumab (anti-PDGFRA), oleclumab (anti-5′-nucleotidase), olendalizumab (anti-complement C5a), olokizumab (anti-IL-6), omalizumab (anti-IgE Fc region), omburtamab (anti-CD276), oMS721 (anti-MASP-2), onartuzumab (anti-human scatter factor receptor kinase), ontuxizumab (anti-TEM1), onvatilimab (anti-VISTA (protein) (VSIR)); opicinumab (anti-LINGO-1), oportuzumab monatox (anti-EpCAM), oregovomab (anti-CA-125), orticumab (anti-oxLDL), otelixizumab (anti-CD3), otilimab (anti-GMCSF), otlertuzumab (anti-CD37), oxelumab (anti-OX-40), ozanezumab (anti-NOGO-A), ozoralizumab (anti-TNF-α), pagibaximab (anti-lipoteichoic acid), palivizumab (anti-F protein of respiratory syncytial virus), pamrevlumab (anti-connective tissue growth factor (CTGF)), panitumumab (anti-epidermal growth factor receptor (EGFR)), pankomab (anti-tumor specific glycosylation of MUC1), panobacumab (anti-Pseudomonas aeruginosa), parsatuzumab (anti-EGFL7), pascolizumab (anti-IL-4), pasotuxizumab (anti-folate hydrolase), pateclizumab (anti-lymphotoxin alpha (LTA)), patritumab (anti-ERBB3 (HER3)), PDR001 (anti-PD-1), pembrolizumab (anti-PD-1), pemtumomab (anti-MUC1), perakizumab (anti-IL-17A), pertuzumab (anti-HER2/neu), pexelizumab (anti-C5), pidilizumab (anti-PD-1), pinatuzumab vedotin (anti-CD22), pintumomab (anti-adenocarcinoma antigen), placulumab (anti-TNF), pozelimab (anti-C5), prezalumab (anti-TNF), plozalizumab (anti-CCR2), pogalizumab (anti-tumor necrosis factor receptor (TNFR) superfamily member 4), polatuzumab vedotin (anti-CD79B), ponezumab (anti-β-amyloid), porgaviximab (anti-Zaire ebolavirus glycoprotein), prasinezumab (anti-Alpha-synuclein), prezalizumab (anti-inducible T-cell co-stimulatory ligand (ICOSL)), priliximab (anti-CD4), pritoxaximab (anti-E. coli shiga toxin type-1), pritumumab (anti-vimentin), PRO 140 (anti-CCR5), quilizumab (anti-IGHE), racotumomab (anti-NGNA ganglioside), radretumab (anti-fibronectin extra domain-B), rafivirumab (anti-rabies virus glycoprotein), ralpancizumab (anti-PCSK9), ramucirumab (anti-VEGFR2), ranevetmab (anti-NGF), ranibizumab (anti-VEGF-A), raxibacumab (anti-anthrax toxin protective antigen), ravagalimab (anti-CD40), ravulizumab (anti-C5), refanezumab (anti-myelin-associated glycoprotein), regavirumab (anti-cytomegalovirus glycoprotein B), regdanvimab (anti-spike protein receptor binding domain (RBD) of SARS-CoV-2), relatlimab (anti-LAG3), remtolumab (anti-IL-17A, TNF), reslizumab (anti-IL-5), retifanlimab (anti-PD-1), rilotumumab (anti-hepatocyte growth factor (HGF)), rinucumab (anti-PDGFRB), risankizumab (anti-IL-23A), rituximab (anti-CD20), rivabazumab pegol (anti-Pseudomonas aeruginosa type III secretion system), robatumumab (anti-IGF-1 receptor (CD221)), rmab (anti-rabies virus G glycoprotein), roledumab (anti-RHD (gene) (RHD)), romilkimab (anti-IL-13), romosozumab (anti-sclerostin), rontalizumab (anti-IFN-α), rosmantuzumab (anti-root plate-specific spondin 3), rovalpituzumab tesirine (anti-DLL3), rovelizumab (anti-CD11, anti-CD18), rozanolixizumab (anti-FCGRT), ruplizumab (anti-CD154 (CD40L)), SA237 (anti-IL-6 receptor), sacituzumab govitecan (anti-TROP-2), samalizumab (anti-CD200), samrotamab vedotin (anti-LRRC15), sarilumab (anti-IL-6), satralizumab (anti-IL-6 receptor), satumomab pendetide (anti-TAG-72), secukinumab (anti-IL-17A), selicrelumab (anti-CD40), seribantumab (anti-ERBB3 (HER3)), setoxaximab (anti-E. coli shiga toxin type-2), setrusumab (anti-sclerostin (SOST)), sevirumab (anti-cytomegalovirus), sibrotuzumab (anti-FAP (gene) (FAP)), SGN-CD19A (anti-CD19), SHP647 (anti-mucosal addressin cell adhesion molecule), sifalimumab (anti-IFN-α), siltuximab (anti-IL-6), simtuzumab (anti-LOXL2), siplizumab (anti-CD2), sirtratumab vedotin (anti-SLITRK6), sirukumab (anti-IL-6), sofituzumab vedotin (anti-CA-125), solanezumab (anti-β-amyloid), solitomab (anti-EpCAM), sonepcizumab (anti-sphingosine-1-phosphate), sontuzumab (anti-episialin), sotrovimab (anti-spike protein receptor binding domain (RBD) of SARS-CoV-2), spartalizumab (anti-PD-1), spesolimab (anti-Interleukin 36 receptor (IL1RL2/IL1RAP)), stamulumab (anti-myostatin), sulesomab (anti-NCA-90 (granulocyte antigen)), suptavumab (anti-RSVFR), sutimlimab (anti-complement component is (Cis)), suvizumab (anti-HIV-1), suvratoxumab (anti-Staphylococcus aureus alpha toxin), tabalumab (anti-B-cell activating factor (BAFF)), tacatuzumab tetraxetan (anti-alpha-fetoprotein), tadocizumab (anti-integrin aIbp3), tafasitamab (anti-CD19), talacotuzumab (anti-CD123), talizumab (anti-IgE), talquetamab (anti-GPRCSD, anti-CD3), tamtuvetmab (anti-CD52), tanezumab (anti-nerve growth factor (NGF)), taplitumomab paptox (anti-CD19), tarextumab (anti-Notch receptor), tavolimab (anti-CD134), teclistamab (anti-B-cell maturation antigen (BCMA), CD3), tefibazumab (anti-clumping factor A), telimomab aritox (anti-CD5), telisotuzumab (anti-HGFR), telisotuzumab vedotin (anti-HGFR), tenatumomab (anti-tenascin C), teneliximab (anti-CD40), teplizumab (anti-CD3), tepoditamab (anti-dendritic cell-associated lectin 2), teprotumumab (anti-IGF-1 receptor (CD221)), tesidolumab (anti-C5), tetulomab (anti-CD37), tezepelumab (anti-thymic stromal lymphopoietin (TSLP)), TGN1412 (anti-CD28), tibulizumab (anti-B-cell activating factor (BAFF)), tildrakizumab (anti-IL-23), tigatuzumab (anti-TRAIL-R2), timigutuzumab (anti-HER2), timolumab (anti-AOC3), tiragotumab (anti-TIGIT), tislelizumab (anti-PCDC1, anti-CD279), tisotumab vedotin (anti-coagulation factor III), tixagevimab (anti-spike protein receptor binding domain (RBD) of SARS-CoV-2), TNX-650 (anti-IL-13), tocilizumab (anti-IL-6 receptor), tomuzotuximab (anti-Epidermal growth factor receptor (EGFR), anti-HER1), toralizumab (anti-CD154 (CD40L)), tosatoxumab (anti-Staphylococcus aureus), tositumomab (anti-CD20), tovetumab (anti-PDGFRA), tralokinumab (anti-IL-13), trastuzumab (anti-HER2/neu), trastuzumab duocarmazine (anti-HER2/neu), trastuzumab emtansine (anti-HER2/neu), TRBS07 (anti-GD2 ganglioside), tregalizumab (anti-CD4), tremelimumab (anti-CTLA-4), trevogrumab (anti-growth differentiation factor 8), tucotuzumab celmoleukin (anti-EpCAM), tuvirumab (anti-hepatitis B virus), ublituximab (anti-CD20), ulocuplumab (anti-CXCR4 (CD184)), urelumab (anti-4-1BB (CD137)), urtoxazumab (anti-Escherichia coli), ustekinumab (anti-IL-12, anti-IL-23), utomilumab (anti-4-1BB (CD137)), vadastuximab talirine (anti-CD33), vanalimab (anti-CD40), vandortuzumab vedotin (anti-STEAP1), vantictumab (anti-Frizzled receptor), vanucizumab (anti-angiopoietin 2), vapaliximab (anti-AOC3/VAP-1), varisacumab (anti-VEGF-A), varlilumab (anti-CD27), vatelizumab (anti-ITGA2/CD49b), vedolizumab (anti-integrin α4β7), veltuzumab (anti-CD20), vepalimomab (anti-AOC3, a.k.a., VAP-1), vesencumab (anti-NRP1), vilobelimab (anti-C5a receptor; C5a), visilizumab (anti-CD3), vobarilizumab (anti-IL-6 receptor), volociximab (anti-integrin α5β1), vonlerolizumab (anti-CD134), vopratelimab (anti-CD278, a.k.a. ICOS), vorsetuzumab mafodotin (anti-CD70), votumumab (anti-tumor antigen CTAA16.88), vunakizumab (anti-IL-17A), xentuzumab (anti-IGF-1, anti-IGF-2), XMAB-5574 (anti-CD19), zalutumumab (anti-Epidermal growth factor receptor, EGFR), zanolimumab (anti-CD4), zatuximab (an anti-HER1), zenocutuzumab (anti-ERBB3/HER3), ziralimumab (anti-CD147/basigin), zolbetuximab (anti-claudin 18 isoform 2), and zolimomab aritox (anti-CD5).

[0513] In some aspects, the payload comprises an antibody or antigen-binding portion thereof targets an apoptosis regulator, e.g., attached to the surface of a liposome encapsulating the AAV-ITR vector or the Rep vector. In some aspects, the payload comprises a dsDNA polynucleotide in the AAV-ITR vector encoding an antibody or antigen-binding portion thereof that targets an apoptosis regulator. In some aspects, the apoptosis regulator is pro-apoptotic gene product, e.g, FasL (Fas ligand), BAX, BID, BAK or BAD. In some aspects, the apoptosis regulator is an anti-apoptotic gene product, e.g, Bcl-XI, a IAPs (e.g., XIAP), or Bcl-2. In some aspects, the apoptosis regulator is a prosurvival factor such as cFLIP, BNIP3, FADD, Akt, or NF-κB.

### Payloads: Gene Editing System Components

[0514] In some aspects, the payload of AAV-ITR based gene delivery system of the present disclosure comprises a polynucleotide comprising one or more components of a gene editing system. In some aspects, the payload comprises a gRNA or a dsDNA encoding a gRNA. In some aspects, the payload comprises a dsDNA encoding a nuclease. In some aspects, the payload comprises a gRNA or a dsDNA encoding a gRNA and a dsDNA encoding a nuclease. In some aspects, the AAV-ITR vector comprises a dsDNA encoding a gRNA and a dsDNA encoding a nuclease. In some aspects, the AAV-ITR vector comprises a dsDNA encoding a nuclease.

[0515] CRISPR/Cas: In some aspects, the gene editing system is a CRISPR/Cas system. In some aspects, the payload of an AAV-ITR based gene delivery system of the present disclosure comprises a polynucleotide encoding a CRISPR Cas nuclease, e.g., a dsRNA encoding a Cas9 nuclease. In some aspects, the CRISPR/Cas nuclease is codon-optimized for the desired cell type in which it is to be expressed. In some aspects, the CRIPS/Cas gene editing system can also employ a guide RNA (gRNA) that comprises two separate molecules. An exemplary two-molecule gRNA comprises a crRNA-like (“CRISPR RNA” or “targeter-RNA” or “crRNA” or “crRNA repeat”) molecule and a corresponding tracrRNA-like (“trans-acting CRISPR RNA” or “activator-RNA” or “tracrRNA” or “scaffold”) molecule. A crRNA comprises both the DNA-targeting segment (single stranded) of the gRNA and a stretch of nucleotides that forms one-half of a double stranded RNA (dsRNA) duplex of the protein-binding segment of the gRNA. A corresponding tracrRNA (activator-RNA) comprises a stretch of nucleotides that forms the other half of the dsRNA duplex of the protein-binding segment of the gRNA. Thus, a stretch of nucleotides of a crRNA are complementary to and hybridize with a stretch of nucleotides of a tracrRNA to form the dsRNA duplex of the protein-binding domain of the gRNA. As such, each crRNA can be said to have a corresponding tracrRNA. The crRNA additionally provides the single stranded DNA-targeting segment. Accordingly, a gRNA comprises a sequence that hybridizes to a target sequence, and a tracrRNA. Thus, a crRNA and a tracrRNA (as a corresponding pair) hybridize to form a gRNA. If used for modification within a cell, the exact sequence and/or length of a given crRNA or tracrRNA molecule can be designed to be specific to the species in which the RNA molecules will be used.

[0516] In some aspects, the CRISPR/Cas gene editing system can employ a fused crRNA-tracrRNA construct (i.e., a single transcript) that functions with the codon-optimized Cas9. This single RNA is often referred to as a guide RNA or gRNA. Within a gRNA, the crRNA portion is identified as the “target sequence” for the given recognition site and the tracrRNA is often referred to as the “scaffold.” To generate a gRNA, a short DNA fragment containing the target sequence is inserted into a guide RNA expression nucleic acid. The gRNA expression nucleic acid comprises the target sequence (in some aspects around 20 nucleotides), a form of the tracrRNA sequence (the scaffold) as well as a suitable promoter that is active in the cell and necessary elements for proper processing in eukaryotic cells.

[0517] In some aspects, the payload of AAV-ITR based gene delivery system of the present disclosure encodes a gRNA comprising the target sequence (in some aspects around 20 nucleotides), a form of the tracrRNA sequence (the scaffold) as well as a suitable promoter. In some aspects, custom, complementary oligonucleotides are annealed to form a double stranded DNA and are then cloned into the gRNA expression nucleic acid, which is included as payload in the AAV-ITR based gene delivery system of the present disclosure. In some aspects, the payload comprises a two-molecule gRNA or a fused crRNA-tracrRNA construct. In some aspects, the payload comprises a dsDNA encoding a Cas9 nuclease and a dsDNA encoding a gRNA. In some aspects, the gRNA can be provided in the form of separate crRNA and tracrRNA molecules, or separate dsDNA molecules encoding the crRNA and tracrRNA, respectively.

[0518] In some aspects, the gRNA comprises a third nucleic acid sequence encoding a Clustered Regularly Interspaced Short Palindromic Repeats (CRISPR) RNA (crRNA) and a trans-activating CRISPR RNA (tracrRNA). In some aspects, the Cas protein to be used with the AAV-ITR based gene delivery system of the present disclosure is a type I Cas protein. In some aspects, the Cas protein is a type II Cas protein. In some aspects, the type II Cas protein is Cas9. In some aspects, the type II Cas, e.g., Cas9 protein, is a human codon-optimized Cas.

[0519] In certain aspects, the Cas protein is a “nickase” that can create single strand breaks (i.e., “nicks”) at the target site without cutting both strands of double stranded DNA (dsDNA). Cas9, for example, comprises two nuclease domains—a RuvC-like nuclease domain and an HNH-like nuclease domain—which are responsible for cleavage of opposite DNA strands. Mutation in either of these domains can create a nickase. Examples of mutations creating nickases can be found, for example, WO/2013/176772A1 and WO/2013/142578A1, each of which is herein incorporated by reference.

[0520] In certain aspects, two separate Cas proteins (e.g., nickases) specific for a target site on each strand of dsDNA can create overhanging sequences complementary to overhanging sequences on another nucleic acid, or a separate region on the same nucleic acid. The overhanging ends created by contacting a nucleic acid with two nickases specific for target sites on both strands of dsDNA can be either 5′ or 3′ overhanging ends. For example, a first nickase can create a single strand break on the first strand of dsDNA, while a second nickase can create a single strand break on the second strand of dsDNA such that overhanging sequences are created. The target sites of each nickase creating the single strand break can be selected such that the overhanging end sequences created are complementary to overhanging end sequences on a different nucleic acid molecule. The complementary overhanging ends of the two different nucleic acid molecules can be annealed by the methods disclosed herein. In some aspects, the target site of the nickase on the first strand is different from the target site of the nickase on the second strand.

[0521] In some aspects, the first nucleic acid comprises a mutation that disrupts at least one amino acid residue of nuclease active sites in the Cas protein, wherein the mutant Cas protein generates a break in only one strand of the target DNA region, and wherein the mutation diminishes non-homologous recombination in the target DNA region. In some aspects, the first nucleic acid that encodes the Cas protein further comprises a nuclear localization signal (NLS). In some aspects, the nuclear localization signal is a SV40 nuclear localization signal.

[0522] Talen: In some aspects, the AAV-ITR based gene delivery system of the present disclosure can comprise a polynucleotide encoding a TALEN system. TAL effector nucleases are a class of sequence-specific nucleases that can be used to make double-strand breaks at specific target sequences in the genome of a prokaryotic or eukaryotic organism. TAL effector nucleases are created by fusing a native or engineered transcription activator-like (TAL) effector, or functional part thereof, to the catalytic domain of an endonuclease, such as, for example, FokI.

[0523] The unique, modular TAL effector DNA binding domain allows for the design of proteins with potentially any given DNA recognition specificity. Thus, the DNA binding domains of the TAL effector nucleases can be engineered to recognize specific DNA target sites and thus, used to make double-strand breaks at desired target sequences. See, WO 2010/079430; Morbitzer et al. (2010) PNAS 10.1073/pnas.1013133107; Scholze & Boch (2010) Virulence 1:428-432; Christian et al. Genetics (2010) 186:757-761; Li et al. (2010) Nuc. Acids Res. (2010) doi:10.1093/nar/gkg704; and Miller et al. (2011) Nature Biotechnology 29:143-148; all of which are herein incorporated by reference.

[0524] Examples of suitable TAL nucleases, and methods for preparing suitable TAL nucleases, are disclosed, e.g., in US Patent Application No. 2011/0239315 A1, 2011/0269234 A1, 2011/0145940 A1, 2003/0232410 A1, 2005/0208489 A1, 2005/0026157 A1, 2005/0064474 A1, 2006/0188987 A1, and 2006/0063231 A1 (each hereby incorporated by reference).

[0525] In various aspects, TAL effector nucleases are engineered that cut in or near a target nucleic acid sequence in, e.g., a genomic locus of interest, wherein the target nucleic acid sequence is at or near a sequence to be modified by a targeting vector. The TAL nucleases suitable for use with the various methods and compositions provided herein include those that are specifically designed to bind at or near target nucleic acid sequences to be modified in a target cell using the AAV-ITR based gene delivery system of the present disclosure.

[0526] In some aspects, each monomer of the TALEN comprises 12-25 TAL repeats, wherein each TAL repeat binds a 1 bp subsite. In some aspects, the nuclease agent is a chimeric protein comprising a TAL repeat-based DNA binding domain operably linked to an independent nuclease. In some aspects, the independent nuclease is a FokI endonuclease. In some aspects, the nuclease agent comprises a first TAL-repeat-based DNA binding domain and a second TAL-repeat-based DNA binding domain, wherein each of the first and the second TAL-repeat-based DNA binding domain is operably linked to a FokI nuclease, wherein the first and the second TAL-repeat-based DNA binding domain recognize two contiguous target DNA sequences in each strand of the target DNA sequence separated by about 6 bp to about 40 bp cleavage site, and wherein the FokI nucleases dimerize and make a double strand break at a target sequence.

[0527] In some aspects, the nuclease agent comprises a first TAL-repeat-based DNA binding domain and a second TAL-repeat-based DNA binding domain, wherein each of the first and the second TAL-repeat-based DNA binding domain is operably linked to a FokI nuclease, wherein the first and the second TAL-repeat-based DNA binding domain recognize two contiguous target DNA sequences in each strand of the target DNA sequence separated by a 5 bp or 6 bp cleavage site, and wherein the FokI nucleases dimerize and make a double strand break.

[0528] Zinc-finger nucleases: In some aspects, the AAV-ITR based gene delivery system of the present disclosure can comprise a polynucleotide encoding a zinc-finger nuclease (ZFN) system. In some aspects, each monomer of the ZFN comprises 3 or more zinc finger-based DNA binding domains, wherein each zinc finger-based DNA binding domain binds to a 3 bp subsite. In other aspects, the ZFN is a chimeric protein comprising a zinc finger-based DNA binding domain operably linked to an independent nuclease. In some aspects, the independent endonuclease is a FokI endonuclease. In some aspects, the nuclease agent comprises a first ZFN and a second ZFN, wherein each of the first ZFN and the second ZFN is operably linked to a FokI nuclease, wherein the first and the second ZFN recognize two contiguous target DNA sequences in each strand of the target DNA sequence separated by about 6 bp to about 40 bp cleavage site or about a 5 bp to about 6 bp cleavage site, and wherein the FokI nucleases dimerize and make a double strand break. See, for example, US20060246567; US20080182332; US20020081614; US20030021776; WO/2002/057308A2; US20130123484; US20100291048; and, WO/2011/017293A2, each of which is herein incorporated by reference.

[0529] Meganucleases: In some aspects, the AAV-ITR based gene delivery system of the present disclosure can comprise a polynucleotide encoding a meganuclease system. Meganucleases (or homing endonucleases or HEases) have been classified into four families based on conserved sequence motifs, the families are the “LAGLIDADG,” “GIY-YIG,” “H-N-H,” and “His-Cys box” families. These motifs participate in the coordination of metal ions and hydrolysis of phosphodiester bonds.

[0530] HEases are notable for their long recognition sites, and for tolerating some sequence polymorphisms in their DNA substrates. Meganuclease domains, structure and function are known, see for example, Guhan and Muniyappa (2003) Crit Rev Biochem Mol Biol 38:199-248; Lucas et al., (2001) Nucleic Acids Res 29:960-9; Jurica and Stoddard, (1999) Cell Mol Life Sci 55:1304-26; Stoddard, (2006) Q Rev Biophys 38:49-95; and Moure et al., (2002) Nat Struct Biol 9:764.

[0531] In some aspects, the meganuclease can be a naturally occurring variant or an engineered derivative. Methods for modifying the kinetics, cofactor interactions, expression, optimal conditions, and/or recognition site specificity, and screening for activity are known, see for example, Epinat et al., (2003) Nucleic Acids Res 31:2952-62; Chevalier et al., (2002) Mol Cell 10:895-905; Gimble et al., (2003) Mol Biol 334:993-1008; Seligman et al., (2002) Nucleic Acids Res 30:3870-9; Sussman et al., (2004) J Mol Biol 342:31-41; Rosen et al., (2006) Nucleic Acids Res 34:4791-800; Chames et al., (2005) Nucleic Acids Res 33:e178; Smith et al., (2006) Nucleic Acids Res 34:e149; Gruen et al., (2002) Nucleic Acids Res 30:e29; Chen and Zhao, (2005) Nucleic Acids Res 33:e154; WO2005105989; WO2003078619; WO2006097854; WO2006097853; WO2006097784; and WO2004031346.

[0532] Any meganuclease can be used with the AAV-ITR based gene delivery system of the present disclosure, including, but not limited to, I-SceI, I-SceII, I-SceIII, I-SceIV, I-SceV, I-SecVI, I-SceVII, I-CeuI, I-CeuAIIP, I-CreI, I-CrepsbIP, I-CrepsbIIP, I-CrepsbIIIP, I-CrepsbIVP, I-TliI, I-PpoI, PI-PspI, F-SceI, F-SceII, F-SuvI, F-TevI, F-TevII, I-AmaI, I-Anil, I-ChuI, I-CmoeI, I-CpaI, I-CpaII, I-CsmI, I-CvuI, I-CvuAIP, I-DdiI, I-DdiII, I-DirI, I-DmoI, I-HmuI, I-HmuII, I-HsNIP, I-LlaI, I-MsoI, I-NaaI, I-NanI, I-NcIIP, I-NgrIP, I-NitI, I-NjaI, I-Nsp236IP, I-PakI, I-PboIP, I-PcuIP, I-PcuAI, I-PcuVI, I-PgrIP, I-PobIP, I-PorIIP, I-PbpIP, I-SpBetaIP, I-ScaI, I-SexIP, I-SneIP, I-SpomI, I-SpomCP, I-SpomIP, I-SpomIIP, I-SquIP, I-Ssp6803I, I-SthPhiJP, I-SthPhiST3P, I-SthPhiSTe3bP, I-TdeIP, I-TevI, I-TevII, I-TevIII, I-UarAP, I-UarHGPAIP, I-UarHGPA13P, I-VinIP, I-ZbiIP, PI-MtuI, PI-MtuHIP, PI-MtuHIIP, PI-PfuI, PI-PfuII, PI-PkoI, PI-PkoII, PI-Rma43812IP, PI-SpBetaIP, PI-SceI, PI-TfuI, PI-TfuII, PI-ThyI, PI-TliI, PI-TliII, or any active variants or fragments thereof.

[0533] In some aspects, the meganuclease recognizes double-stranded DNA sequences of 12 to 40 base pairs. In some aspects, the meganuclease recognizes one perfectly matched target sequence in one of the heterologous plasmids described herein. In some aspects, the meganuclease is a homing nuclease. In some aspects, the homing nuclease is a “LAGLIDADG” family of homing nuclease. In some aspects, the “LAGLIDADG” family of homing nuclease is selected from I-SceI, I-CreI, and I-Dmol.

[0534] Restriction endonucleases: In some aspects, the AAV-ITR based gene delivery system of the present disclosure can comprise a polynucleotide encoding a restriction endonuclease, which includes Type I, Type II, Type III, and Type IV endonucleases. Type I and Type III restriction endonucleases recognize specific recognition sites, but typically cleave at a variable position from the nuclease-binding site, which can be hundreds of base pairs away from the cleavage site (recognition site). In Type II systems the restriction activity is independent of any methylase activity, and cleavage typically occurs at specific sites within or near to the binding site. Most Type II enzymes cut palindromic sequences, however Type IIa enzymes recognize non-palindromic recognition sites and cleave outside of the recognition site, Type IIb enzymes cut sequences twice with both sites outside of the recognition site, and Type IIs enzymes recognize an asymmetric recognition site and cleave on one side and at a defined distance of about 1-20 nucleotides from the recognition site. Type IV restriction enzymes target methylated DNA. Restriction enzymes are further described and classified, for example in the REBASE database (webpage at rebase.neb.com; Roberts et al., (2003) Nucleic Acids Res 31:418-20), Roberts et al., (2003) Nucleic Acids Res 31:1805-12, and Belfort et al., (2002) in Mobile DNA II, pp. 761-783, Eds. Craigie et al., (ASM Press, Washington, D.C.).

### Payload: Therapeutic Oligonucleotides.

[0535] Nucleic acid active agents suitable for use in the AAV-ITR based gene delivery system of the present disclosure include all types of RNA and all types of DNA, including also oligonucleotides such as probes and primers used in the polymerase chain reaction (PCR), hybridizations, or DNA sequencing. In some aspects, the nucleic acid comprises dsDNA, mRNA, miRNA, miRNA sponge, tough decoy miRNA (TD), antimir (antagomir), small RNA, rRNA, siRNA, shRNA, gDNA, cDNA, pDNA, PNA, BNA, antisense oligonucleotide (ASO), aptamer, cyclic dinucleotide, or any combination thereof.

[0536] In some aspects, the payload is a nucleic acid, e.g., a dsDNA, in the AAV-ITR vector of a AAV-ITR based gene delivery system of the present disclosure that encodes a therapeutic oligonucleotide disclosed below or combination thereof (e.g., several concatenated oligonucleotides). In some aspects, the payload is a therapeutic oligonucleotide disclosed below or combination thereof coencapsulated into the lipidic delivery system (e.g., liposome) encapsulating the AAV-ITR vector. In some aspects, the payload is a therapeutic oligonucleotide disclosed below or combination thereof coencapsulated into the lipidic delivery system (e.g., liposome) encapsulating the Rep vector. In some aspects, the payload is a therapeutic oligonucleotide disclosed below or combination thereof attached to the surface of the lipidic delivery system (e.g., liposome) encapsulating the AAV-ITR vector. In some aspects, the payload is a therapeutic oligonucleotide disclosed below or combination thereof attached to the surface the lipidic delivery system (e.g., liposome) encapsulating the Rep vector.

[0537] In some aspects, the payload comprises a short interfering RNA (siRNA), which is a double-stranded RNA that can induce sequence-specific post-transcriptional gene silencing, thereby decreasing or even inhibiting gene expression. For example, siRNAs can trigger the specific degradation of homologous RNA molecules, such as mRNAs, within the region of sequence identity between both the siRNA and the target RNA. Non-limiting exemplary siRNAs are disclosed in WO 02/44321, which is incorporated by reference in its entirety.

[0538] In some aspects, the payload comprises a short hairpin RNAs (shRNAs). In some aspects, the biologically active molecule comprises a miRNA or a miRNA inhibitor (antimiR). In some aspects, the payload can be 10-30 nucleotides in length, for example from 14-25 nucleotides in length. In some aspects, the biologically active molecule (payload) has a length of 16-30 nucleotides, 18-25 nucleotides, particularly 18, 19, 20, 21, 22, 23, 24, or 25 nucleotides.

[0539] Sequences for miRNAs are available publicly, for example, through the miRBase registry (Griffiths-Jones, et al., Nucleic Acids Res., 36(Database Issue):D154-D158 (2008); Griffiths-Jones, et al., Nucleic Acids Res., 36(Database Issue):D140-D144 (2008); Griffiths-Jones, et al., Nucleic Acids Res., 36(Database Issue):D109-D111 (2008)) and other publically accessible databases.

[0540] In some aspects, the miRNA inhibitors are oligomers or polymers of ribonucleic acid (RNA) or deoxyribonucleic acid (DNA) or modifications thereof. In some aspects, the miRNA antagonists are antimir. Antimirs are a specific class of miRNA inhibitors that are described, for example, in US2007/0213292 to Stoffel et al. Antimirs are RNA-like oligonucleotides that contain various modifications for RNase protection and pharmacologic properties such as enhanced tissue and cellular uptake. Antimirs differ from normal RNA by having complete 2′-O-methylation of sugar, phosphorothioate backbone and a cholesterol-moiety at 3′-end.

[0541] Non-limiting examples of antimirs and other miRNA inhibitors are described in WO2009/020771, WO2008/091703, WO2008/046911, WO2008/074328, WO2007/090073, WO2007/027775, WO2007/027894, WO2007/021896, WO2006/093526, WO2006/112872, WO2007/112753, WO2007/112754, WO2005/023986, or WO2005/013901, all of which are hereby incorporated by reference.

[0542] In some aspects, the nucleic acids are phosphodiester antisense oligonucleotides, and any oligonucleotides where the sugar-phosphate “backbone” has been derivatized or replaced with “backbone analogues” such as with phosphorothioate, phosphorodithioate, phosphoroamidate, alkyl phosphotriester, or methylphosphonate linkages. In some aspects, the nucleic acids active agents are antisense oligonucleotides, and any oligonucleotides or oligodeoxynucleotides with non-phosphorous backbone analogues such as sulfamate, 3′-thioformacetal, methylene(methylimino) (MMI), 3′-N-carbamate, or morpholino carbamate.

[0543] In some aspects, the payload is an antimir. As used herein, the terms “antimir,” “anti microRNA,” “anti miRNA,” and variants thereof refer to molecules (e.g., synthetically generated molecules) that are used to neutralize microRNA (miRNA) function in cells for desired responses. miRNA are complementary sequences (approx. 20-22 bp) to mRNA that are involved in the cleavage of RNA or the suppression of the translation. By controlling the miRNA that regulate mRNAs in cells, antimirs (also called anti-miRNA oligonucleotides, AMOs, or antagomirs) can be used as further regulation as well as for therapeutic for certain cellular disorders. This regulation can occur through a steric blocking mechanism as well as hybridization to miRNA.

[0544] These interactions within the body between antimirs and a miRNA can be for therapeutics in disorders in which over/under expression occurs or aberrations in miRNA lead to coding issues. Some of the miRNA-linked disorders that are encountered in the humans include cancers, muscular diseases, autoimmune disorders, and viruses.

[0545] Various components of antimirs can be manipulated to affect the binding affinity and potency of the antimir. The 2′-sugar of the antimirs can be modified to be substituted with fluorine and various methyl groups, almost all with an increase in binding affinity. However, some of these modified 2′-sugar antimirs lead to negative effects on cell growth. Modifying the 5′-3′ phosphodiester backbone linkage to a phosphorothioate (P-S) backbone linkage is also known to have an effect on target affinity. Using the P-S mutation was shown to decrease the Tm of the oligonucleotide, which leads to a lower target affinity. A final requirement for antimirs is mismatch specificity and length restrictions. Due to miRNAs in the same families sharing “seed” (shared) sequences and differ by only a couple of additional nucleotides; one antimir can potentially target multiple miRNA sequences.

[0546] In some aspects, the payload comprises a therapeutic oligonucleotide or a combination thereof. In some aspects, the payload is a therapeutic oligonucleotide disclosed below.

[0547] In some aspects the therapeutic oligonucleotide is selected from the group consisting of 1018 ISS, AB-729, abetimus, AEG35156 (GEM640), afovirsen, aganirsen, agatolimod, alicaforsen, ALNAAT-02, amlivirsen, anivamersen, apatorsen, aprinocarsen, APTA-16, AR-177 (ZINTEVIR™), ARC19499 (BAX-499), archexin, AROANG-3, AROAPOC-3, ARO-HSD, AS1411 (AGRO100), ASM-8, asvasiran, atesidorsen, ATL-1102, ATU-027, avacincaptad pegol (ZIMURA™), AVI-4126 (Resten-MP™), AVI-7288, AVI-7537, AVT-02, AZD-8233, AZD-8701, baliforsen, bamosiran, bazlitoran, BC007, beclanorsen, belcesiran, bepirovirsen, bevasiranib, BIIB-080, BMN 044, BMN 053, brivoligide, casimersen, cavrotolimod, cemdisiran, cenersen, cepadacursen (CIVI 008), cimdelirsen, cobitolimod, cobomarsen, CODA-001 (NEXAGON™), cofirasersen, cosdosiran, CpG 7909, CPG-8954, cupabimod, custirsen, danvatirsen, daplusiran, defibrotide (DEFITELIO™), dematirsen, donidalorsen, drisapersen (KYNDRISA™), DYN-101, edifoligide, egaptivon pegol, EIF-4E, eluforsen, emapticap pegol, eplontersen, eteplirsen (EXONDYS 51™), fazisiran, fesomersen, fitusiran, fomivirsen (VITRAVENE™), frenlosirsen, gataparsen, givosiran (GIVLAARI™), GNKG-168 (CPG-685), golodirsen (SRP-4053, VYONDYS 53™), GPI-2A, GTI-2040 (LOR-2040), GTI-2501, GTX-102, HBVAXPRO, imetelstat, IMT-504, inclisiran, inotersen (TEGSEDI™), ION-224, ION-253, ION-363, ION-464, ION-541, ION-859, IONIS-AGTLRx, IONIS-APO(a)-Rx, IONISAR-2.5Rx, IONIS-C9Rx, IONIS-DNM2-2.5Rx, IONISENAC-2.5Rx, IONIS-FB-LRx, IONIS-FXILRx, IONIS-FXIRx, IONIS-GCGRRx, IONIS-HBVLRX, IONIS-MAPTRx, IONIS-PKKRx, IONISTMPRSS-6LRx, IONIS-TTRRx, ISIS EIF4E Rx, ISIS-104838, ISIS-1082, ISIS-113715, ISIS-2503, ISIS-333611, ISIS-426115, ISIS-449884, ISIS-463588, ISIS-5132, ISIS-702843, ISIS-757456, ISIS-863633, ISTH-0036, JNJ-3989, lademirsen, lexanersen (WVE-120102), lexaptepid pegol (NOX-H94), litenimod, LSP-GR3, lumasiran, mipomersen (KYNAMRO™), miravirsen, monarsen, mongersen, MT-5745, MTL-CEBPA, ND-L02-s0201 (BMS-986263), nedosiran, NS-089, nusinersen (SPINRAZA™), oblimersen (SPC2996, GENASENSE™), olaptesed pegol (NOX-A12), olezarsen, olpasiran, OLX-101, patisiran (ONPATTRO™), pegaptanib (MACUGEN™), PEGnivacogin, pegpleranib (FOVISTA™), pelacarsen, prexigebersen, PUL-042, QPI-1007, QR-1123, QRX-421a, radavirsen, remlarsen, renadirsen, revusiran, RG-012, RG-101, RG-6346, RGLS-4326, rimigorsen, rosomidnar, rovanersen (WVE-120101), sapablursen, SBO10, sepofarsen, siG-12D-LODER, SLN124, SR-063, SRP-5051, STK-001, STP-705, suvodirsen, tadnersen, temavirsen, teprasiran, tilsotolimod, tivanisiran (SYLENTIS™), tofersen, tominersen, tomligisiran, TOP-1731, trabedersen (AP-12009), trecovirsen, varodarsen, VEGLIN 3, vidutolimod, viltolarsen (VILTEPSO™), VIR-2218, volanesorsen (WAYLIVRA™) vupanorsen, vutrisiran, WVE-003, WVE-004, WVEN-531, zilebesiran, and zilganersen.

[0548] In some aspects, the payload comprises an antisense oligonucleotide that targets an apoptosis regulator. In some aspects, the apoptosis regulator is pro-apoptotic gene product, e.g., FasL (Fas ligand), BAX, BID, BAK or BAD. In some aspects, the apoptosis regulator is an anti-apoptotic gene product, e.g, Bcl-XI, an IAPs (e.g., XIAP), or Bcl-2. In some aspects, the apoptosis regulator is a prosurvival factor such as cFLIP, BNIP3, FADD, Akt, or NF-κB.

[0549] In some aspects, the nucleic acid therapeutic agent is 1018 ISS, also known as ISS-1018, which is a CpG oligonucleotide which functions as an immunostimulant. The oligonucleotide sequence of 1018 ISS is set forth in SEQ ID NO:571. In some aspects, the nucleic acid therapeutic agent is AEG35156, an antisense oligonucleotide for the treatment of hepatocellular carcinoma, acute myeloid leukemia, B-cell lymphoma, chronic lymphocytic leukemia, multiple sclerosis, non-small cell lung cancer, or pancreatic cancer that targets X-Linked Inhibitor of Apoptosis (XIAP). The oligonucleotide sequence of AEG35156 is set forth in SEQ ID NO:572. In some aspects, the nucleic acid therapeutic agent is AB-729, an anti-miRNA (antimir) for the treatment of hepatitis B infection that targets hepatitis virus B's HBsAg.

[0550] In some aspects, the nucleic acid therapeutic agent is abetimus, an immunosuppressant oligonucleotide for the treatment of lupus nephritis. The oligonucleotide sequences of abetimus comprises a subunit 1 of SEQ ID NO:573, a subunit 2 of SEQ ID NO:574, a subunit 3 of SEQ ID NO:575, a subunit 4 of SEQ ID NO:576, a subunit 5 of SEQ ID NO:577, a subunit 6 of SEQ ID NO:578, a subunit 7 of SEQ ID NO:579, and a subunit 8 of SEQ ID NO:580. In some aspects, the nucleic acid therapeutic agent is afovirsen, an antisense oligonucleotide for the treatment of human papillomavirus infection that targets the mRNA of human papillomavirus. The oligonucleotide sequence of afovirsen is set forth in SEQ ID NO:581.

[0551] In some aspects, the nucleic acid therapeutic agent is aganirsen, also known as GS101, which is an antisense oligonucleotide used for the inhibition of corneal neovascularization, a major risk factor of corneal graft rejection that targets insulin receptor substrate-1 (IRS1). The oligonucleotide sequence of aganirsen is set forth in SEQ ID NO:582. In some aspects, the nucleic acid therapeutic agent is agatolimod, also known as CPG-7909, AMA1-C1 or PF-3512676, which is a CpG oligodeoxynucleotide for the treatment of cancers such as basal cell cancer, non-Hodgkin's lymphoma, breast cancer, metastatic or recurrent malignancies, non-small cell lung cancer, infectious diseases, allergies, and asthma that acts as a toll-like receptor 9 (TLR9) agonist. The oligonucleotide sequence of agatolimod is set forth in SEQ ID NO:583.

[0552] In some aspects, the nucleic acid therapeutic agent is alicaforsen, an antisense oligonucleotide for the treatment of acute distress flares in moderate to severe inflammatory bowel disease that targets ICAM-1. The oligonucleotide sequence of alicaforsen is set forth in SEQ ID NO:584. In some aspects, the nucleic acid therapeutic agent is AGRO100, also known as AS1411, which is an aptamer used for the treatment of acute myeloid leukemia, advanced solid tumors, metastatic renal cell carcinoma, and myeloid leukemia that targets IKBKG. The oligonucleotide sequence of AGRO100 is set forth in SEQ ID NO:585. In some aspects, the nucleic acid therapeutic agent is amlivirsen, an antiviral antisense oligonucleotide. The oligonucleotide sequence of amlivirsen is set forth in SEQ ID NO:586.

[0553] In some aspects, the nucleic acid therapeutic agent is anivamersen and/or pegnivacogin. Anivamersen and pegnivacogin are components of the REG1 anticoagulation system. Pegnivacogin is an RNA aptamer inhibitor of coagulation factor IXa and anivamersen is a complementary sequence reversal oligonucleotide. The oligonucleotide sequence of pegnivacogin is set forth in SEQ ID NO:587. The oligonucleotide sequence of anivamersen is set forth in SEQ ID NO:588. In some aspects, the nucleic acid therapeutic agent is apatorsen, also known as OGX-427, which is an antisense oligonucleotide used for the treatment of advanced squamous cell lung cancers that targets Hsp27. The oligonucleotide sequence of apatorsen is set forth in SEQ ID NO:589. In some aspects, the nucleic acid therapeutic agent is aprinocarsen, an antisense oligonucleotide for the treatment of cancer that targets PKC-c. The oligonucleotide sequence of aprinocarsen is set forth in SEQ ID NO:590.

[0554] In some aspects, the nucleic acid therapeutic agent is APTA-16, an aptamer for the treatment of acute myeloid leukemia, myelodysplastic syndromes, or liver cancer, that targets histone methyltransferase. In some aspects, the nucleic acid therapeutic agent is AR-177, also known as ZINTEVIR™, which is an oligonucleotide analogue that functions as an integrase inhibitor and can be used for the treatment of HIV-1 infection. The oligonucleotide sequence of AR-177 is set forth in SEQ ID NO:591. In some aspects, the nucleic acid therapeutic agent is ARC19499, also known as BAX-499, which is an RNA aptamer for the treatment of hemophilia that targets TFPI. The oligonucleotide sequence of ARC19499 is set forth in SEQ ID NO:592.

[0555] In some aspects, the nucleic acid therapeutic agent is archexin, also known as RX-201, which is an antisense oligonucleotide for the treatment of metastatic renal cancer, ovarian cancer, renal cell carcinoma, glioblastoma, stomach cancer, pancreatic cancer, lung cancer, or cervical carcinomas that targets the AKT-1 protein kinase. The oligonucleotide sequence of archexin is set forth in SEQ ID NO:593. In some aspects, the nucleic acid therapeutic agent is asvasiran, a siRNA for the treatment of respiratory syncytial virus infection that targets the RSV N gene. The oligonucleotide sequence of asvasiran is a duplex RNA comprising the antisense sequence of SEQ ID NO:594 and the sense sequence of SEQ ID NO:595. In some aspects, the nucleic acid therapeutic agent is atesidorsen, also known as ATL1103, which is an antisense oligonucleotide for the treatment of acromegaly, cancer, or diabetic retinopathy that targets somatotropin receptors. The oligonucleotide sequence of atesidorsen is set forth in SEQ ID NO:596. In some aspects, the nucleic acid therapeutic agent is ATU-027. ATU-027 is a siRNA targeting protein kinase N3 that inhibits cancer progression, e.g., in prostate and pancreatic cancer. The oligonucleotide sequence of ATU-027 is a RNA duple comprising the antisense sequence set forth in SEQ ID NO:597 and the sense sequence set forth in SEQ ID NO:598. In some aspects, the nucleic acid therapeutic agent is AVT-02 developed by Avontec GmbH. AVT-02 is a short, double stranded oligonucleotide decoy for the treatment of psoriasis vulgaris that targets STAT-1. In some aspects, the nucleic acid therapeutic agent is avacincaptad pegol (ZIMURA™). Avacincaptad pegol is PEG-conjugated oligonucleotide for the treatment of polyploidal choroidal vasculopathy, Stargardt disease, or wet age-related macular degeneration that functions as a complement C5 inhibitor. The oligonucleotide sequence of avacincaptad pegol is set forth in SEQ ID NO:599.

[0556] In some aspects, the nucleic acid therapeutic agent is AVI-7537. AVI-7537 is a morpholino antisense oligonucleotide that targets the VP24 gene of Ebola virus. The oligonucleotide sequence of AVI-7537 is set forth in SEQ ID NO:600. In some aspects, the nucleic acid therapeutic agent is AVI-7288. AVI-7288 is a morpholino antisense oligonucleotide that targets Marburg virus nucleoprotein (NP). In some aspects, the nucleic acid therapeutic agent is baliforsen. Baliforsen, also known as IONIS-598769, is an antisense oligonucleotide for the treatment of myotonic dystrophy. The oligonucleotide sequence of baliforsen is set forth in SEQ ID NO:601. In some aspects, the nucleic acid therapeutic agent is bamosiran. Bamosiran, also known as SYL-040012, is a siRNA for the treatment of glaucoma or ocular hypertension that targets beta 2 adrenergic receptors. The oligonucleotide sequence of bamosiran is a duplex RNA comprising an antisense strand of SEQ ID NO:602 and a sense strand of SEQ ID NO:603. In some aspects, the nucleic acid therapeutic agent is bazlitoran. Bazlitoran, also known as IMO-8400, is a DNA oligonucleotide for the treatment of Waldenstrom's macroglobulinemia that targets toll-like receptors TLR7, TLR8 and TLR9. The oligonucleotide sequence of bazlitoran is set forth in SEQ ID NO:604. In some aspects, the nucleic acid therapeutic agent is BC007. BC007 is a non-modified DNA aptamer out of a family of aptamers that bind to and lead to the neutralization of autoantibodies that are directed against G-protein-coupled receptors (GPCR-AABs). BC007 binds to 131-adrenergic-receptor-autoantibodies. BC007 can be used for the treatment of dilated cardiomyopathy or chronic fatigue syndrome.

[0557] In some aspects, the nucleic acid therapeutic agent is beclanorsen. Beclanorsen, also known as SPC-2996, is an antisense oligonucleotide for the treatment of lymphoid leukemias that targets Bcl-2. The oligonucleotide sequence of beclanorsen is set forth in SEQ ID NO:605. In some aspects, the nucleic acid therapeutic agent is bepirovirsen. Bepirovirsen, also known as ISIS-505358, ISIS-GSK3RX, GSK-3228836 or IONIS HBVRX, is an antisense oligonucleotide for the treatment of hepatitis B. The oligonucleotide sequence of bepirovirsen is set forth in SEQ ID NO:606. In some aspects, the nucleic acid therapeutic agent is bevasiranib. Bevasiranib is a siRNA for the treatment of exudative age-related macular degeneration that targets VEGF. The oligonucleotide sequence of bevasiranib is an RNA duplex comprising an antisense strand of SEQ ID NO:607 and a sense strand of SEQ ID NO:608. In some aspects, the nucleic acid therapeutic agent is BMN 044. BMN 044, also known as PR044, is an antisense oligonucleotide for the treatment of Duchenne muscular dystrophy that targets mRNA encoding dystrophin. In some aspects, the nucleic acid therapeutic agent is BMN 053. BMN 053, also known as PR053, is an antisense oligonucleotide for the treatment of Duchenne muscular dystrophy that targets dystrophin. In some aspects, the nucleic acid therapeutic agent is brivoligide. Brivoligide is a 23 bp decoy DNA that functions an early growth response protein 1 inhibitor. Brivoligide can be used to treat pain, e.g., postoperative pain. The oligonucleotide sequence of brivoligide is a duplex DNA comprising SEQ ID NO:609 and SEQ ID NO:610. In some aspects, the nucleic acid therapeutic agent is casimersen. Casimersen is a morpholino antisense oligonucleotide for the treatment of Duchenne muscular dystrophy that targets dystrophin's exon 45. The oligonucleotide sequence of casimersen is set forth in SEQ ID NO:611.

[0558] In some aspects, the nucleic acid therapeutic agent is cavrotolimod. Cavrotolimod is an immunostimulant oligonucleotide that functions as a TLR9 agonists and can be used for the treatment of hematological malignancies, Merkel cell carcinoma, solid tumors, or squamous cell cancer. The oligonucleotide sequence of cavrotolimod is set forth in SEQ ID NO:612. In some aspects, the nucleic acid therapeutic agent is cemdisiran. Cemdisiran, also known as AD062643, is a siRNA for the treatment of hemolytic uremic syndrome, IgA nephropathy, paroxysmal nocturnal hemoglobinuria, or myasthenia gravis that targets complement C5. The oligonucleotide sequence of cemdisiran is an RNA duplex comprising an antisense strand of SEQ ID NO:613 and a sense strand of SEQ ID NO:614. In some aspects, the nucleic acid therapeutic agent is cenersen. Cenersen is an antisense oligonucleotide for the treatment of myelodysplastic syndromes, acute myeloid leukemia, or chronic lymphocytic leukemia that targets p53. The oligonucleotide sequence of cenersen is set forth in SEQ ID NO:615. In some aspects, the nucleic acid therapeutic agent is cobitolimod. Cobitolimod is an oligodeoxyribonucleotide for the treatment of ulcerative colitis or brain edema that is an agonist of Toll-like 9 receptors. The oligonucleotide sequence of cobitolimod is set forth in SEQ ID NO:616. In some aspects, the nucleic acid therapeutic agent is cobomarsen. Cobomarsen, also known as MRG-106 or M11667, is an anti-miRNA (antimir) for the treatment of cutaneous T cell lymphoma, adult T-cell leukemia-lymphoma, chronic lymphocytic leukemia, diffuse large B cell lymphoma, or amyotrophic lateral sclerosis that targets miR-155. In some aspects, the nucleic acid therapeutic agent is CODA-001. CODA-001, also known as NEXAGON™, is an antisense oligonucleotide for the treatment of wounds, leg ulcers, diabetic foot ulcers, or corneal injuries that targets gap junctions. NEXAGON™ is a natural, unmodified oligonucleotide (30-mer) that downregulates expression of the key gap junction protein Cx43. The oligonucleotide sequence of CODA-001 is set forth in SEQ ID NO:617.

[0559] In some aspects, the nucleic acid therapeutic agent is cofirasersen. Cofirasersen, also known as is an IONIS-ENACRX and ION-827359, is an antisense oligonucleotide for the treatment of pulmonary disease, chronic bronchitis, or cystic fibrosis that targets ENaC. The oligonucleotide sequence of cofirasersen is set forth in SEQ ID NO:618. In some aspects, the nucleic acid therapeutic agent is cosdosiran. Cosdosiran, also known as QPI-1007, is a neuroprotective siRNA for the treatment of nonarteritic anterior ischemic optic neuropathy that inhibits caspase 2 synthesis. The oligonucleotide sequence of cosdosiran is an RNA duplex comprising an antisense strand of SEQ ID NO:619 and a sense strand of sequence SEQ ID NO:620. In some aspects, the nucleic acid therapeutic agent is CPG-8954. CPG-8954 is a CpG oligonucleotide for the treatment of cancer and viral infections. The oligonucleotide sequence of CPG-8954 is set forth in SEQ ID NO:621. In some aspects, the nucleic acid therapeutic agent is cupabimod. Cupabimod, also known as AMG-0103, is an oligonucleotide for the treatment of pain, e.g., chronic discogenic lumbar back pain. The oligonucleotide sequence of cupabimod is a double stranded DNA comprising the sequences set forth in SEQ ID NO:622 and SEQ ID NO:623. In some aspects, the nucleic acid therapeutic agent is custirsen. Custirsen, also known as OGX-011 and ISIS-112989, is an antisense oligonucleotide for the treatment of metastatic castrate resistant prostate cancer that targets clusterin. The oligonucleotide sequence of custirsen is set forth in SEQ ID NO:624. In some aspects, the nucleic acid therapeutic agent is danvatirsen. Danvatirsen, also known as AZD 9150 and ISIS-481464, is an antisense oligonucleotide for the treatment of bladder cancer, colorectal cancer, head and neck cancer, malignant ascites, non-small cell lung cancer, pancreatic cancer, solid tumors, liver cancer, non-Hodgkin's lymphoma, or diffuse large B cell lymphoma, and targets the STAT3 transcription factor. The oligonucleotide sequence of danvatirsen is set forth in SEQ ID NO:625.

[0560] In some aspects, the nucleic acid therapeutic agent is daplusiran. Daplusiran is an antiviral siRNA. The oligonucleotide sequence of daplusiran is an RNA duplex comprising an antisense strand of SEQ ID NO:626 and a sense strand of SEQ ID NO:627. In some aspects, the nucleic acid therapeutic agent is defibrotide (DEFITELIO™). Defibrotide, also known as DASOVAS™, NORAVID™, or PROCICLIDE™, is a heparanase inhibitor that functions as an angiogenesis and platelet aggregation inhibitor. Defibrotide is a mixture of single-stranded oligonucleotides that can be used for the treatment of veno-occlusive disorders, graft-versus-host disease, neurological disorders, thrombotic microangiopathies, deep vein thrombosis, thrombosis, diabetic nephropathies, or multiple myeloma. In some aspects, the nucleic acid therapeutic agent is the antisense oligonucleotide dematirsen. The oligonucleotide sequence of dematirsen is set forth in SEQ ID NO:628. In some aspects, the nucleic acid therapeutic agent is the antisense oligonucleotide donidalorsen. Donidalorsen, also known as ISIS-721744, is a plasma kallikrein inhibitor that can be used for the treatment of COVID 2019 infections, hereditary angioedema, or acute respiratory disease. The oligonucleotide sequence of donidalorsen is set forth in SEQ ID NO:629. In some aspects, the nucleic acid therapeutic agent is drisapersen (KYNDRISA™) Drisapersen, also known as GSK 2402968A, is an antisense oligonucleotide for the treatment of Duchenne muscular dystrophy that targets mRNA encoding dystrophin. The oligonucleotide sequence of drisapersen is set forth in SEQ ID NO:630. In some aspects, the nucleic acid therapeutic agent is edifoligide. Edifoligide is a 14 bp decoy DNA that functions as a CDC2 kinase inhibitor and can be used for the treatment of coronary artery restenosis or vascular graft occlusion. The oligonucleotide sequence of edifoligide is a double stranded DNA comprising the sequences set forth in SEQ ID NO:631 and SEQ ID NO:632.

[0561] In some aspects, the nucleic acid therapeutic agent is egaptivon pegol. Egaptivon pegol, also known as ARC1779, is an aptamer for the treatment of intracranial embolism, cerebral thromboembolism, carotid stenosis, von Willebrand disease, thrombotic thrombocytopenic purpura, thrombotic microangiopathy, thrombosis, or acute myocardial infarction that targets VWF GP1BA. The oligonucleotide sequence of egaptivon pegol is set forth in SEQ ID NO:633. In some aspects, the nucleic acid therapeutic agent is EIF-4E ASO. EIF-4E ASO is an antisense oligonucleotide for the treatment of prostate cancer. The oligonucleotide sequence of EIF-4E ASO is set forth in SEQ ID NO:634. In some aspects, the nucleic acid therapeutic agent is eluforsen. Eluforsen, also known as QR-010, is an oligonucleotide partly complementary to Phe508del-CFTR RNA. Eluforsen, also known as QR-010 is designed to repair CFTR-encoded mRNA. The oligonucleotide sequence of eluforsen is set forth in SEQ ID NO:635. In some aspects, the nucleic acid therapeutic agent is emapticap pegol. Emapticap pegol, also known as NOX-E36, is an aptamer for the treatment of systemic lupus erythematosus type 2, diabetes mellitus, chronic inflammatory diseases, albuminuria, and renal impairment that targets CCL2. The oligonucleotide sequence of emapticap pegol is set forth in SEQ ID NO:636. In some aspects, the nucleic acid therapeutic agent is eplontersen. Eplontersen, also known as ION-TTR-LRX or AKCEA-TTR-LRX, is an antisense oligonucleotide that functions as a prealbumin expression inhibitor and can be used to treat amyloidosis or transthyretin-related hereditary amyloidosis. The oligonucleotide sequence of eplontersen is set forth in SEQ ID NO:637. In some aspects, the nucleic acid therapeutic agent is eteplirsen (EXONDYS 51™). Eteplirsen, also known, AVI-4658, is an antisense oligonucleotide for the treatment of Duchenne muscular dystrophy that targets DMD exon 51. The oligonucleotide sequence of eteplirsen is set forth in SEQ ID NO:638.

[0562] In some aspects, the nucleic acid therapeutic agent is the antisense oligonucleotide fesomersen. The oligonucleotide sequence of fesomersen is set forth in SEQ ID NO:639. In some aspects, the nucleic acid therapeutic agent is fitusiran. Fitusiran, also known as ALN-57213, is a siRNA for the treatment of hemophilia A and B that targets SERPINC1. The oligonucleotide sequence of fitusiran is a RNA duplex comprising an antisense strand of SEQ ID NO:640 and a sense strand of SEQ ID NO:641. In some aspects, the nucleic acid therapeutic agent is fomivirsen (VITRAVENE™). Fomivirsen is an antisense oligonucleotide for the treatment of cytomegalovirus-induced retinitis and HIV infections that targets cytomegalovirus mRNA. The oligonucleotide sequence of fomivirsen is set forth in SEQ ID NO:642. In some aspects, the nucleic acid therapeutic agent is gataparsen. Gataparsen is an antisense oligonucleotide for the treatment of acute myeloid leukemia, non-small cell lung cancer, or prostate cancer that targets BIRC5. The oligonucleotide sequence of gataparsen is set forth in SEQ ID NO:643.

[0563] In some aspects, the nucleic acid therapeutic agent is givosiran (GIVLAARI™). Givosiran is a siRNA for the treatment of acute hepatic porphyria that targets 5-aminolevulinate synthetase (ALAS1). The oligonucleotide sequence of givosiran comprises the antisense sequence set forth in SEQ ID NO:644 and the sense sequence set forth in SEQ ID NO:645. In some aspects, the nucleic acid therapeutic agent is GNKG-168. GNKG-168, also known as CPG-685, is an oligonucleotide that functions as a TLR9 agonist. GNKG-168 can be used for the treatment of chronic lymphocytic leukemia. The oligonucleotide sequence of GNKG-168 is set forth in SEQ ID NO:646. In some aspects, the nucleic acid therapeutic agent is golodirsen (VYONDYS 53™) Golodirsen, also known as SRP-4053 and VYONDYS 53™, is an antisense oligonucleotide used to treat Duchenne muscular dystrophy via splicing modulation that targets DMD exon 53. The oligonucleotide sequence of golodirsen is set forth in SEQ ID NO:647. In some aspects, the nucleic acid therapeutic agent is GPI-2A. GPI-2A is an antisense oligonucleotide for the treatment of HIV that inhibits the expression of human immunodeficiency virus type 1 capsid. The oligonucleotide sequence of GPI-2A is set forth in SEQ ID NO:648. In some aspects, the nucleic acid therapeutic agent is GTI-2040. GTI-2040, also known as LOR-2040, is an antisense oligonucleotide for the treatment of renal cell carcinoma that functions as a DNA synthesis inhibitor. GTI-2040 can also be used for the treatment of acute myeloid leukemia, bladder cancer, breast cancer, chronic myeloid leukemia, colorectal cancer, myelodysplastic syndromes, non-small cell lung cancer, or prostate cancer. The oligonucleotide sequence of GTI-2040 is set forth in SEQ ID NO:649. In some aspects, the nucleic acid therapeutic agent is GTI-2501. GTI-2501 is an antisense oligonucleotide for the treatment of renal cell carcinoma that functions as a DNA synthesis inhibitor by targeting the ribonucleoside-diphosphate reductase large subunit. GTI-2501 can also be used for the treatment of acute myeloid leukemia, bladder cancer, breast cancer, chronic myeloid leukemia, colorectal cancer, myelodysplastic syndromes, non-small cell lung cancer, or prostate cancer. The oligonucleotide sequence of GTI-2501 is set forth in SEQ ID NO:650.

[0564] In some aspects, the nucleic acid therapeutic agent is HBVAXPRO. HBVAXPRO is a decoy for the treatment of Hepatitis B that targets HBV. In some aspects, the nucleic acid therapeutic agent is IMT-504. IMT-504 is a B cell immunostimulant oligonucleotide for the treatment of diabetes mellitus, rabies, breast cancer, chronic lymphocytic leukemia, hepatitis B, influenza virus infections, neuropathic pain, osteoporosis, or sepsis. The oligonucleotide sequence of IMT-504 is set forth in SEQ ID NO:651. In some aspects, the nucleic acid therapeutic agent is inclisiran. Inclisiran, also known as ALN-60212, is a siRNA for the treatment of hypercholesterolemia that targets PCSK9. The oligonucleotide sequence of inclisiran is an RNA duplex comprising an antisense strand of SEQ ID NO:652 and a sense strand of SEQ ID NO:653.

[0565] In some aspects, the nucleic acid therapeutic agent is inotersen (TEGSEDI™) Inotersen is an antisense oligonucleotide for the treatment of hereditary transthyretin-mediated amyloidosis or polyneuropathy that targets TTR. The oligonucleotide sequence of inotersen is set forth in SEQ ID NO:654. In some aspects, the nucleic acid therapeutic agent is imetelstat. Imetelstat is a telomerase inhibitor oligonucleotide for the treatment of myelodysplastic syndromes, myelofibrosis, multiple myeloma, acute myeloid leukemia, chronic myeloid leukemia, breast cancer, essential thrombocythaemia, lymphoproliferative disorders, non-small cell lung cancer, polycythaemia vera, or solid tumors. The oligonucleotide sequence of imetelstat is set forth in SEQ ID NO:655. In some aspects, the nucleic acid therapeutic agent is IONIS-APO(a)-Rx. IONIS-APO(a)-Rx is an antisense oligonucleotide for the treatment of high lipoprotein levels that targets apolipoprotein A. In some aspects, the nucleic acid therapeutic agent is IONIS-C9Rx. IONIS-C9Rx is an antisense oligonucleotide for the treatment of ALS that targets C90RF72. In some aspects, the nucleic acid therapeutic agent is IONIS-DNM2-2.5Rx. IONIS-DNM2-2.5Rx is antisense oligonucleotide for the treatment of centronuclear myopathy that targets DNM2. In some aspects, the nucleic acid therapeutic agent is IONIS-FXIRx. IONIS-FXIRx is an antisense oligonucleotide for the treatment of total knee arthroplasty that targets Factor XI. In some aspects, the nucleic acid therapeutic agent is IONIS-GCGRRx. IONIS-GCGRRx is an antisense oligonucleotide for the treatment of type 2 diabetes that targets glucagon receptor. In some aspects, the nucleic acid therapeutic agent is IONIS-MAPTRx. IONIS-MAPTRx is an antisense oligonucleotide for the treatment of Alzheimer disease that targets MAPT. In some aspects, the nucleic acid therapeutic agent is IONIS-TTRRx. IONIS-TTRRx is an antisense oligonucleotide for the treatment of familial amyloid polyneuropathy (FAP) that targets transthyretin. In some aspects, the nucleic acid therapeutic agent is ISIS EIF4E Rx. ISIS EIF4E Rx is an antisense oligonucleotide for the treatment of castrate-resistant prostate cancer that targets eIF-4E. In some aspects, the nucleic acid therapeutic agent is ISIS-104838, ISIS-1082, ISIS-2503, ISIS-333611, ISIS-113715, ISIS-426115, ISIS-449884, ISIS-463588, ISIS-5132, ISIS-702843, or ISIS-757456.

[0566] In some aspects, the nucleic acid therapeutic agent is lademirsen. Lademirsen is an antisense oligonucleotide that targets miR-21. The oligonucleotide sequence of lademirsen is set forth in SEQ ID NO:656. In some aspects, the nucleic acid therapeutic agent is lexaptepid pegol. Lexaptepid pegol, also known as NOX-H94, is an aptamer for the treatment of anemia, end stage renal disease, anemia of chronic disease, chronic diseases, or inflammation that targets hepcidin. The oligonucleotide sequence of lexaptepid pegol is set forth in SEQ ID NO:657. In some aspects, the nucleic acid therapeutic agent is litenimod. Litenimod is a 26-mer modified oligodeoxynucleotides (ODN) that functions as a TLR9 agonist. The oligonucleotide sequence of litenimod is set forth in SEQ ID NO:658. In some aspects, the nucleic acid therapeutic agent is lumasiran. Lumasiran is a siRNA for the treatment of primary hyperoxaluria type 1 that targets HAO1. The oligonucleotide sequence of lumasiran is a double stranded RNA (dsRNA) comprising an antisense strand of SEQ ID NO:659 and a sense strand of SEQ ID NO:660. In some aspects, the nucleic acid therapeutic agent is mipomersen (KYNAMRO™). Mipomersen is antisense oligonucleotide for the treatment of familial hypercholesterolemia that targets APOB. The oligonucleotide sequence of mipomersen is set forth in SEQ ID NO:661. In some aspects, the nucleic acid therapeutic agent is miravirsen. Miravirsen, also known as SPC3649, is an antisense oligonucleotide for the treatment of chronic hepatitis C (CHC) infection that targets miRNA-122. The oligonucleotide sequence of miravirsen is set forth in SEQ ID NO:662.

[0567] In some aspects, the nucleic acid therapeutic agent is mongersen. Mongersen, also known as GED-0301, is an antisense oligonucleotide for the treatment of Crohn's disease that targets SMAD7. The oligonucleotide sequence of mongersen is set forth in SEQ ID NO:663. In some aspects, the nucleic acid therapeutic agent is MTL-CEBPA. MTL-CEBPA is a small activating RNA (saRNA) designed to reduce immune suppression of myeloid cells by restoring C/EBP-α protein to normal levels using the RNA activation mechanism. MTL-CEBPA can be used for the treatment of liver cancer, solid tumors, colorectal cancer, hepatocellular carcinoma, or liver disorders. In some aspects, the nucleic acid therapeutic agent is ND-L02-s0201. ND-L02-s0201, also known as BMS-986263, is a siRNA for the treatment of extensive hepatic fibrosis that targets HSP47. In some aspects, the nucleic acid therapeutic agent is nedosiran. Nedosiran is a siRNA for the treatment of primary hyperoxaluria that targets LDHA. The oligonucleotide sequence of nedosiran is a double stranded RNA (dsRNA) comprising an antisense strand of SEQ ID NO:664 and a sense strand of SEQ ID NO:665. In some aspects, the nucleic acid therapeutic agent is nusinersen (SPINRAZA™). Nusinersen is an antisense oligonucleotide (splice modulator) for the treatment of infantile-onset spinal muscular atrophy that targets exon 7 of the Survival of Motor Neuron 2 (SMN2) splicing modulator. The oligonucleotide sequence of nusinersen is set forth in SEQ ID NO:666. In some aspects, the nucleic acid therapeutic agent is oblimersen (GENASENSE™). Oblimersen is an antisense oligonucleotide for the treatment of melanoma that targets Bcl-2. The oligonucleotide sequence of oblimersen is set forth in SEQ ID NO:667. In some aspects, the nucleic acid therapeutic agent is olaptesed pegol. Olaptesed pegol, also known as NOX-A12, is an aptamer for the treatment of chronic lymphocytic leukemia, multiple myeloma, hematopoietic stem cell transplantation, autologous stem cell transplantation, glioblastoma, metastatic colorectal cancer, or metastatic pancreatic cancer that targets CXCL12. The oligonucleotide sequence of olaptesed pegol is set forth in SEQ ID NO:668.

[0568] In some aspects, the nucleic acid therapeutic agent is olpasiran. Olpasiran is a siRNA for the treatment of cardiovascular disorders that targets lipoprotein(a) (Lp(a). The oligonucleotide sequence of olpasiran is a double stranded RNA (dsRNA) comprising an antisense strand of SEQ ID NO:669 and a sense strand of SEQ ID NO:670. In some aspects, the nucleic acid therapeutic agent is patisiran (ONPATTRO™). Patisiran is a siRNA for the treatment of hereditary transthyretin-mediated amyloidosis and neuropathy that targets transthyretin. The oligonucleotide sequence of patisiran is a double stranded RNA (dsRNA) comprising an antisense strand of SEQ ID NO:671 and a sense strand of SEQ ID NO:672. In some aspects, the nucleic acid therapeutic agent is pegaptanib (MACUGEN™). Pegaptanib is an aptamer for the treatment of wet macular degeneration neovascular age-related macular degeneration that targets VEGF. The oligonucleotide sequence of pegaptanib is set forth in SEQ ID NO:673. In some aspects, the nucleic acid therapeutic agent is pegpleranib (FOVISTA™). Pegpleranib is an aptamer for the treatment of subfoveal neovascular age-related macular degeneration that targets PDGF-B. The oligonucleotide sequence of pegpleranib is set forth in SEQ ID NO:674. In some aspects, the nucleic acid therapeutic agent is pelacarsen. Pelacarsen, also known as IONIC-APO(a)-LRX and ISIS-681257, is an antisense oligonucleotide form the treatment of hyperlipoproteinemia that targets apolipoprotein A. The oligonucleotide sequence of pelacarsen is set forth in SEQ ID NO:675. In some aspects, the nucleic acid therapeutic agent is prexigebersen. Prexigebersen is an antisense oligonucleotide for the treatment of acute myeloid leukemia, myelodysplastic syndromes, chronic myeloid leukemia, precursor cell lymphoblastic leukemia-lymphoma, colorectal cancer, head and neck cancer, lymphoma, solid tumors, thyroid cancer, or breast cancer that targets GRB2. The oligonucleotide sequence of prexigebersen is set forth in SEQ ID NO:676.

[0569] In some aspects, the nucleic acid therapeutic agent is radavirsen. Radavirsen, also known as AVI-7100, is an antisense oligonucleotide for the treatment of influenza A virus infections. The oligonucleotide sequence of radavirsen is set forth in SEQ ID NO:677. In some aspects, the nucleic acid therapeutic agent is remlarsen. Remlarsen is a miRNA mimic for the treatment of cutaneous fibrosis. Remlarsen mimics miR-29. The oligonucleotide sequence of remlarsen is a double stranded RNA (dsRNA) comprising an antisense strand of SEQ ID NO:678 and a sense strand of SEQ ID NO:679. In some aspects, the nucleic acid therapeutic agent is renadirsen. Renadirsen, also known as renapersen, is an antisense oligonucleotide for the treatment of Duchenne muscular dystrophy that functions by stimulating the expression of dystrophin. The oligonucleotide sequence of renadirsen is set forth in SEQ ID NO:680. In some aspects, the nucleic acid therapeutic agent is Resten-MP™. Resten-MP™, also known as AVI-4126, is an antisense oligonucleotide for the treatment of de novo native coronary artery lesions that targets c-myc The oligonucleotide sequence of AVI-4126 is set forth in SEQ ID NO:681. In some aspects, the nucleic acid therapeutic agent is revusiran. Revusiran, also known as AD-51547, is a siRNA for the treatment of hereditary amyloidosis that targets TTR. The oligonucleotide sequence of revusiran is a double stranded RNA (dsRNA) comprising an antisense strand of SEQ ID NO:682 and a sense strand of SEQ ID NO:683. In some aspects, the nucleic acid therapeutic agent is RGLS-4326. RGLS-4326 is antisense oligonucleotide antimir for the treatment of autosomal dominant polycystic kidney disease that targets miR-17. The oligonucleotide sequence of RGLS-4326 is set forth in SEQ ID NO:684.

[0570] In some aspects, the nucleic acid therapeutic agent is rimigorsen. Rimigorsen is an antisense oligonucleotide for the treatment of Duchenne muscular dystrophy that promotes the synthesis of functional dystrophin. The oligonucleotide sequence of rimigorsen is set forth in SEQ ID NO:685. In some aspects, the nucleic acid therapeutic agent is rosomidnar. Rosomidnar, also known as PNT-100, is an oligonucleotide inhibitor of apoptosis regulator Bcl2 that can be used for the treatment of diffuse large B cell lymphoma, Richter's syndrome, non-Hodgkin's lymphoma, or solid tumors. The oligonucleotide sequence of rosomidnar is set forth in SEQ ID NO:686. In some aspects, the nucleic acid therapeutic agent is SB010. SB010 is an antisense oligonucleotide for the treatment of mild allergic asthma that targets GATA-3. In some aspects, the nucleic acid therapeutic agent is SLN124. SLN124 is a siRNA for the treatment of 0-thalassemia that targets TMPRSS6. In some aspects, the nucleic acid therapeutic agent is SRP-5051. SRP-5051 is a PPMO antisense oligonucleotide for the treatment of Duchenne muscular dystrophy that target DMD exon 51. SRP-5051 is next generation eteplirsen, in that it targets the same population, those amenable to exon 51 skipping, but the compound is “charged”, meaning that its cell-penetrating capacity is increased. In some aspects, the nucleic acid therapeutic agent is RG-012. RG-012 is an antisense oligonucleotide antimir for the treatment of Aport syndrome that target miR-21. In some aspects, the nucleic acid therapeutic agent is suvodirsen. Suvodirsen, also known as WVE-210201, is an antisense oligonucleotide for the treatment of Duchenne muscular dystrophy that targets DMD exon 51. The oligonucleotide sequence of suvodirsen is set forth in SEQ ID NO:687. In some aspects, the nucleic acid therapeutic agent is temavirsen. Temavirsen, also known as RG-101 and RG-2459, is an antiviral antisense oligonucleotide that targets the hepatitis C virus. The oligonucleotide sequence of temavirsen is set forth in SEQ ID NO:688. In some aspects, the nucleic acid therapeutic agent is teprasiran. Teprasiran, also known as QPI-1002, is a siRNA inhibitor of tumor suppressor protein p53. Teprasiran can be used for the treatment of acute kidney injury or delayed graft function. The oligonucleotide sequence of teprasiran is a double stranded RNA (dsRNA) comprising an antisense strand of SEQ ID NO:689 and a sense strand of SEQ ID NO:690.

[0571] In some aspects, the nucleic acid therapeutic agent is tivanisiran (SYLENTIS™) Tivanisiran, also known as SYL-1001, is a siRNA that targets the Transient Receptor Potential Vanilloid-1 (TRPV1) channel family. Tivanisiran can be used to treat ocular pain. The oligonucleotide sequence of tivanisiran is a double stranded RNA (dsRNA) comprising an antisense strand of SEQ ID NO:691 and a sense strand of SEQ ID NO:692. In some aspects, the nucleic acid therapeutic agent is tofersen. Tofersen, also known as IONIS-SOD1Rx and BIIB-067, is an antisense oligonucleotide for the treatment of Amyotrophic Lateral Sclerosis (ALS) that targets SOD1. The oligonucleotide sequence of tofersen is set forth in SEQ ID NO:693. In some aspects, the nucleic acid therapeutic agent is tominersen. Tominersen, also known as IONIS-HTTRx, RG-6042 and ISIS-443139, is an antisense oligonucleotide for the treatment of Huntington's disease that targets HTT. The oligonucleotide sequence of tominersen is set forth in SEQ ID NO:694. In some aspects, the nucleic acid therapeutic agent is trabedersen. Trabedersen, also known as AP-12009 and A-12009, is an antisense oligonucleotide which is an inhibitor of transforming growth factor beta 2. Trabedersen can be used to treat glioblastoma, malignant melanoma, pancreatic cancer, COVID 2019 infections, COVID-19 pneumonia, ovarian cancer, colorectal cancer, or anaplastic astrocytoma. The oligonucleotide sequence of trabedersen is set forth in SEQ ID NO:695. In some aspects, the nucleic acid therapeutic agent is trecovirsen. Trecovirsen is an antisense oligonucleotide for the treatment of AIDS that targets GAG. The oligonucleotide sequence of trecovirsen is set forth in SEQ ID NO:696. In some aspects, the nucleic acid therapeutic is vidutolimod. Vidutolimod, also known as CMP-001 is an immunostimulant oligonucleotide for the treatment of malignant melanoma, head and neck cancer, lymphoma, solid tumors, squamous cell cancer, colorectal cancer, non-small cell lung cancer, allergic asthma, atopic dermatitis, hepatitis B, perennial allergic rhinitis, or seasonal allergic rhinitis. The oligonucleotide sequence of vidutolimod is set forth in SEQ ID NO:697.

[0572] In some aspects, the nucleic acid therapeutic agent is viltolarsen (VILTEPSO™) (SEQ ID NO:698). Viltolarsen is an antisense oligonucleotide for the treatment of Duchenne's muscular dystrophy that targets DMD exon 53. In some aspects, the nucleic acid therapeutic agent is volanesorsen (WAYLIVRA™) (SEQ ID NO:699). Volanesorsen, also known as ISIS-304801, is an antisense oligonucleotide for the treatment of hypertriglyceridemia, familial chylomicronemia syndrome, or familial partial lipodystrophy that targets ApoC-III. In some aspects, the nucleic acid therapeutic agent is vupanorsen (SEQ ID NO:700). Vupanorsen, also known as IONIS-ANGPTL3-LRx, AKCEA-ANGPTL3-LRx and ISIS-703802, is an antisense oligonucleotide conjugate (GalNAc3) for the treatment of cardiovascular disease and reduce triglyceride and cholesterol levels, that targets angiopoietin-like 3 (ANGPTL3). In some aspects, the nucleic acid therapeutic agent is vutrisiran. Vutrisiran, also known as ALN-TTRsc02 and ALN-65492, is a siRNA for the treatment of hereditary amyloidosis that targets TTR. The oligonucleotide sequence of vutrisiran is a double stranded RNA (dsRNA) comprising an antisense strand of SEQ ID NO:701 and a sense strand of SEQ ID NO:702. In some aspects, the nucleic acid therapeutic agent is WVE-120101 (rovanersen, also known as WV-1092) or WVE-120102 (lexanersen, also known as WV-2603). WVE-120101 and WVE-120102 are antisense oligonucleotides for the treatment of Huntington's disease that target mutant HTT. WVE-120101 and WVE-120102 interfere with the mutant mRNA copy of the HTT gene. The oligonucleotide sequence of WVE-120101 (rovanersen) is set forth in SEQ ID NO:703. The oligonucleotide sequence of WVE-120102 (lexanersen) is set forth in SEQ ID NO:704. In some aspects, the nucleic acid therapeutic agent is CIVI008/cepadacursen (SEQ ID NO:705). In some aspects, cepadacursen can be used to treat diseases or conditions caused by abnormal expression levels and/or activity of PCSK9 selected from the group consisting of atherosclerosis, hypercholesterolemia (e.g., familiar hypercholesterolemia or statin resistant hypercholesterolemia), HDL/LDL cholesterol imbalance, dyslipidemia (e.g., familial hyperlipidemia (FCHL) or acquired hyperlipidemia), coronary artery disease (CAD), and coronary heart disease (CHD).

[0573] In some aspects, the nucleic acid therapeutic agent is ISIS-863633, which has the sequence set forth in SEQ ID NO:706. In some aspects, the nucleic acid therapeutic agent is ALNAAT-02, which targets SERPINA1. In some aspects, the nucleic acid therapeutic agent is AROANG-3, which targets ANGPTL3. In some aspects, the nucleic acid therapeutic agent is AROAPOC-3, which targets APOC3. In some aspects, the nucleic acid therapeutic agent is ARO-HSD, which targets HSD17B13. In some aspects, the nucleic acid therapeutic agent is AS1411, which targets nucleolin and has the sequence set forth in SEQ ID NO:707. In some aspects, the nucleic acid therapeutic agent is ASM-8, which targets CCR4 and CSF2RB. In some aspects, the nucleic acid therapeutic agent is ATL-1102, which targets ITGA4. In some aspects, the nucleic acid therapeutic agent is AZD-8233, which targets PCSK9. In some aspects, the nucleic acid therapeutic agent is AZD-8701, which targets FOXP3. In some aspects, the nucleic acid therapeutic agent is belcesiran, which targets SERPINA1 and has the sequences set forth in SEQ ID NO:708 and SEQ ID NO:709. In some aspects, the nucleic acid therapeutic agent is BIIB-080, which targets MAPT. In some aspects, the nucleic acid therapeutic agent is cimderlirsen, which targets GHR and has the sequence set forth in SEQ ID NO:710. In some aspects, the nucleic acid therapeutic agent is CpG 7909, which targets TLR9. In some aspects, the nucleic acid therapeutic agent is DYN-101, which targets DYN2. In some aspects, the nucleic acid therapeutic agent is fazisiran, which targets SERPINA1. In some aspects, the nucleic acid therapeutic agent is frenlosirsen, which targets IRF4 and has the sequence set forth in SEQ ID NO:711. In some aspects, the nucleic acid therapeutic agent is GTX-102, which targets UBE2A. In some aspects, the nucleic acid therapeutic agent is ION-224, which targets DGAT2. In some aspects, the nucleic acid therapeutic agent is ION-253. In some aspects, the nucleic acid therapeutic agent is ION-363, which targets FUS. In some aspects, the nucleic acid therapeutic agent is ION-464, which targets SNCA. In some aspects, the nucleic acid therapeutic agent is ION-541, which targets ATXN2. In some aspects, the nucleic acid therapeutic agent is ION-859, which targets LRRK2. In some aspects, the nucleic acid therapeutic agent is IONIS-AGTLRx, which targets AGT. In some aspects, the nucleic acid therapeutic agent is IONISAR-2.5Rx, which targets AR. In some aspects, the nucleic acid therapeutic agent is IONISENAC-2.5Rx, which targets SCNN1A. In some aspects, the nucleic acid therapeutic agent is IONIS-FB-LRx, which targets CFB. In some aspects, the nucleic acid therapeutic agent is IONIS-FXILRx, which targets F11. In some aspects, the nucleic acid therapeutic agent is IONIS-HBVLRX, which targets HBV. In some aspects, the nucleic acid therapeutic agent is IONIS-PKKRx, which targets KLKB1. In some aspects, the nucleic acid therapeutic agent is IONISTMPRSS-6LRx, which targets TMPRSS6. In some aspects, the nucleic acid therapeutic agent is ISTH-0036, which targets TGFB2. In some aspects, the nucleic acid therapeutic agent is JNJ-3989, which targets HBV. In some aspects, the nucleic acid therapeutic agent is LSP-GR3, which targets GR3 and has the sequence set forth in SEQ ID NO:712. In some aspects, the nucleic acid therapeutic agent is monarsen, which targets AchE and has the sequence set forth in SEQ ID NO:713. In some aspects, the nucleic acid therapeutic agent is MT-5745, which targets CHST15. In some aspects, the nucleic acid therapeutic agent is NS-089, which targets DMD. In some aspects, the nucleic acid therapeutic agent is olezarsen, which targets APOC3 and has the sequence set forth in SEQ ID NO:714.

[0574] In some aspects, the nucleic acid therapeutic agent is OLX-101, which targets CTGF. In some aspects, the nucleic acid therapeutic agent is PUL-042, which targets TLR2, TLR6, and TLR9 and has the sequence set forth in SEQ ID NO:715. In some aspects, the nucleic acid therapeutic agent is QPI-1007, which targets CASP2. In some aspects, the nucleic acid therapeutic agent is QR-1123, which targets RHO. In some aspects, the nucleic acid therapeutic agent is QRX-421a, which targets USH2A. In some aspects, the nucleic acid therapeutic agent is RG-101, which targets miR-122. In some aspects, the nucleic acid therapeutic agent is RG-6346, which targets HBsAg. In some aspects, the nucleic acid therapeutic agent is sapablursen, which targets TMPRSS6 and has the sequence set forth in SEQ ID NO:716. In some aspects, the nucleic acid therapeutic agent is sepofarsen, which targets CEP290 and has the sequence set forth in SEQ ID NO:717. In some aspects, the nucleic acid therapeutic agent is siG-12D-LODER, which targets KRAS. In some aspects, the nucleic acid therapeutic agent is SR-063, which targets AR. In some aspects, the nucleic acid therapeutic agent is STK-001, which targets SVN1A. In some aspects, the nucleic acid therapeutic agent is STP-705, which targets PTGS2/TGFB1. In some aspects, the nucleic acid therapeutic agent is tadnersen, which targets C9orf72 and has the sequence set forth in SEQ ID NO:718. In some aspects, the nucleic acid therapeutic agent is tilsotolimod, which targets TLR9 and has the sequences set forth in SEQ ID NO:719 and SEQ ID NO:720. In some aspects, the nucleic acid therapeutic agent is tomligisiran, which has the sequences set forth in SEQ ID NO:721 and SEQ ID NO:722. In some aspects, the nucleic acid therapeutic agent is TOP-1731, which has the sequence set forth in SEQ ID NO:723. In some aspects, the nucleic acid therapeutic agent is varodarsen, which has the sequence set forth in SEQ ID NO:724. In some aspects, the nucleic acid therapeutic agent is VEGLIN 3, which targets VEGF and has the sequence set forth in SEQ ID NO:725. In some aspects, the nucleic acid therapeutic agent is VIR-2218, which targets HBsAg. In some aspects, the nucleic acid therapeutic agent is WVE-003, which targets HTT. In some aspects, the nucleic acid therapeutic agent is WVE-004, which targets C9orf72. In some aspects, the nucleic acid therapeutic agent is WVEN-531, which targets DMD. In some aspects, the nucleic acid therapeutic agent is zilebesiran, which targets AGT and has the sequences set forth in SEQ ID NO:726 and SEQ ID NO:727. In some aspects, the nucleic acid therapeutic agent is zilganersen, which targets GFAP.

### Payload: Chemotherapy Agents

[0575] In some aspects, the payload comprises a chemotherapy agent. In some aspects, the chemotherapy agent comprises an alkylating agent, antimetabolite, anti-microtubule, topoisomerase inhibitor, cytotoxic antibiotic, or a combination thereof. In some aspects, the chemotherapy agent comprises, e.g., cyclophosphamide, methotrexate, 5-fluorouracil, doxorubicin, docetaxel, vinblastine, vincristine, prednisolone, bleomycin, etoposide, cisplatin, epirubicin, capecitabine, ifosfamide, folinic acid, oxaliplatin, vinorelbine, procarbazine, mistune, dacarbazine, or a combination thereof. In some aspects, the payload comprises a nucleoside analog selected from the group consisting of azacitidine, capecitabine, carmofur, cladribine, clofarabine, cytarabine, decitabine, floxuridine, fludarabine, fluorouracil, gemcitabine, mercaptopurine, nelarabine, pentostatin, tegafur, and tioguanine. In some aspects the payload comprises an antifolate selected from the group consisting of methotrexate, pemetrexed, and raltitrexed. In some aspects, the payload comprises a topisomerase I inhibitor such as irinotecan or topotecan. In some aspects, the payload comprises an anthracycline such as daunorubicin, doxorubicin, epirubicin, idarubicin, mitoxantrone or valrubicine. In some aspects, the payload comprises a podophyllotoxin such as etoposide or teniposide. In some aspects, the payload comprises a taxane such a cabazitaxel, docetaxel, or paclitaxel. In some aspects, the payload comprises a vinca alkaloid selected from the group consisting of vinblastine, vincristine, vindesine, vinflunine, and vinrelbine. In some aspects, the payload comprises an alkylating agent selected from the group consisting of bendamustine, busulfan, carmustine, chlorambucil, chormethine, cyclophosphamide, dacarbazine, folemustine, ifosfamide, lomustine, melphalan, streptozotocin, and temozolomide. In some aspects, the payload comprises a platinum compound selected from the group consisting of carboplatin, cisplatin, nedaplatin, and oxaliplatin.

[0576] In some aspects, the payload comprises a targeted antineoplastic therapeutic agent. In some aspects, the targeted antineoplastic therapeutic agent comprises an antibody, e.g., a monoclonal antibody, or an antigen-binding portion thereof. In some aspects, the monoclonal antibodsy comprises alemtuzumab (anti-CD52), bevacizumab (anti-VEGF), cetuximab (anti-EGFR), denosumab (antri-RNAKL), gemtuzumab ozogamicin (anti-CD33), ibritumomab tiuxetan (anti-CD20), ipilimumab (anti-CTLA4), nivolumab (anti-PD1), ofatumumab (anti-CD20), panitumumab (anti-EGFR), pembrolizumab (anti-PD1), pentuzimab (anti-HER2), rituximab (anti-CD20), tositumomab (anti-CD20), trastuzumab (anti-HER2) or an antigen binding portion thereof.

[0577] In some aspects, the payload comprises a small molecules tyrosine kinase inhibitor. In some aspects, the tyrosine kinase inhibitor is selected from the group consisting of afatinib (EGFR, HER2 and HER4 inhibitor), aflibercept (VEGF and PGF inhibitor), axitinib (multikinase inhibitor), bosutinib (Bcr-Abl and SRc kinase inhibitor), crizotinib (ALK, HGFR, and RON inhibitor), dasatinib (BCR-ABL, SRC family, c-Kit, EPHA2 and PDGFR-β kinase inhibitor), erlotinib (EGFR inhibitor), gefitinib (EGFR inhibitor), imatinib (Bcr-Abl kinase inhibitor), lapatinib (HER2 inhibitor), nilotinib (Bcr-Abl kinase inhibitor), pazopanib (Multikinase inhibitor, including c-KIT, FGFR, PDGFR and VEGFR), ponatinib (Multikinase inhibitor (BEGFR, PDGFR, FGFR, EPH receptors and SRC families of kinases, and KIT, RET, TIE2 and FLT3), that also inhibits T135I Bcr-Abl kinase), regorafenib (Multikinase inhibitor for RET, VEGFR1, VEGFR2, VEGFR3, KIT, PDGFR-alpha, PDGFR-beta, FGFR1, FGFR2, TIE2, DDR2, Trk2A, Eph2A, RAF-1, BRAF, BRAFV600E, SAPK2, PTK5, and Bcr-Abl.), ruxolitinib (JAK1 and JAK2 inhibitor), sorafenib (Multikinase inhibitor, including VEGF and PDGF receptor kinases), sunitinib (Multikinase inhibitor, including VEGF & PDGF receptor tyrosine kinases), and vandelanic (Tyrosine kinase inhibitor (TKI) with selective activity against RET, VEGFR-2 and EGFR).

[0578] In some aspects, the payload comprises an mTOR inhibitor such as everolimus or temsirolimus. In some aspects, the payload comprises a retinoid selected from the group consisting of bexarotene (RXR agonist), isotretinoin (RXR and RAR agonist), tamibarotene (RAR agonist), and tretinoin (RXR and RAR agonist). In some aspects, the payload comprises an immunomodulatory agent (IMID) such as lenalidomide, thalidomide, or pomalidomide. In some aspects, the payload comprises a histone deacetylase inhibitor such as romidepsin, valproate, or vorinostat.

### Bioavailability and Biodistribution Modifying Agents

[0579] In some aspects, an AAV-ITR based gene delivery system of the present disclosure can comprise a bio-distribution modifying agent. As used herein, the term a “bio-distribution modifying agent,” which refers to an agent that can modify the distribution of an AAV-ITR based gene delivery system of the present disclosure in vivo or in vitro to direct it to a specific cell type or tissue, e.g., liver tissues, lung tissue, muscle tissue; to a specific physiological compartment, e.g., the central nervous system; or across a physiological barrier, e.g., the blood-brain barrier.

[0580] In some aspects, the term “targeting moiety” can be used interchangeably with the term bio-distribution modifying agent. In some aspects, the targeting moiety alters the tropism of the components of an AAV-ITR based gene delivery system of the present disclosure (“tropism moiety”). As used herein, the term “tropism moiety” refers to a targeting moiety that alters and/or enhances the natural movement of the AAV-ITR based gene delivery system of the present disclosure. In that respect, an antibody or combination thereof attached to a lipidic delivery system (e.g., a LNP or liposome) component of an AAV-ITR based gene delivery system of the present disclosure, wherein the antibody or combination thereof targets CD3 and/or CD28, can directs an AAV-ITR based gene delivery system of the present disclosure to T-cells. Thus unless indicated otherwise, the term “targeting moiety” or “targeting molecule” as used herein, encompasses tropism moieties.

[0581] Pharmacokinetics, biodistribution, and in particular tropism and retention in the desired tissue or anatomical location can also be accomplish by selecting the appropriate administration route (e.g., intrathecal administration or intraocular administration to improve tropism to the central nervous system).

[0582] In principle, an AAV-ITR based gene delivery system of the present disclosure comprising at least one tropism moiety that can direct the AAV-ITR based gene delivery system to a specific target cell or tissue (e.g., T cells) can be administered using any suitable administration method known in the art (e.g., intravenous injection or infusion) since the presence of the tropism moiety (alone or in combination with the presence of an antiphagocytic signal and the use of a specific administration route) will induce a tropism of the AAV-ITR based gene delivery system towards the desired target cell or tissue.

[0583] In some aspects, the AAV-ITR based gene delivery system comprises a surface ligand covalently attached to the surface of the lipidic delivery system component (e.g., a LNP or liposome) of the AAV-ITR based gene delivery system, wherein the surface ligand can increase permeation through the blood-brain barrier. In some aspects, the surface ligand is a transferrin receptor.

[0584] In some aspects, the AAV-ITR based gene delivery system comprises a surface ligand covalently attached to the surface of the lipidic delivery system component (e.g., a LNP or liposome) of the AAV-ITR based gene delivery system, wherein the surface ligand is a tissue or cell-specific target ligand that increases tropism to a tissue or physiological compartment.

[0585] In some aspects, the AAV-ITR based gene delivery system comprises a surface ligand covalently attached to the surface of the lipidic delivery system component (e.g., a LNP or liposome) of the AAV-ITR based gene delivery system, wherein the surface ligand is a surface anchored anti-phagocytic signal. In some aspects, the anti-phagocytic signal comprises CD47, CD24, a fragment thereof, and any combination thereof.

### MSTAR Antibody Architectures

[0586] In some aspects, an AAV-ITR vector of the present disclosure can comprise a polynucleotide encoding an MSTAR antibody. In some aspects, the polynucleotides encoding each of the polypeptide components of an MSTAR antibody are concatenated in the AAV-ITR vector. Thus, in some aspects, the AAV-ITR vector encoding an MSTAR antibody can be bicistronic or multicistronic. In some aspects, a targeting antibody directing an AAV-ITR based gene delivery system of the present disclosure to a specific target cell (e.g., a T cell) or tissue, can be covalently attached to the surface of an lipidic delivery system (e.g., a liposome or LNP) disclosed herein. MSTAR antibody formats and methods to conjugate such antibodies to a lipidic delivery system are disclosed in U.S. Appl. Publ. Nos. US20230227553A1, US20230235092A1, US20230203199A1, and PCT Publ. Nos. WO2024007012, WO2023056312, WO2023056313, WO2023056314, and U.S. Provisional Patent Application No. Appl. No. 63/594,875, which are herein incorporated by reference in their entireties.

### Vectors and Cells

[0587] The present disclosure provides vectors such as the components of the AAV-ITR based gene delivery system of the present disclosure, i.e., AAV-ITR vectors and Rep vectors, and combinations thereof. The disclosure also provides cells, e.g., for an ex vivo treatment or for recombinant expression, that comprise, e.g., a gene of interest integrated in its genome using an AAV-ITR based gene delivery system of the present disclosure. The methods to construct the vectors components of the AAV-ITR based gene delivery system of the present disclosure are well known to those skilled in the art, and can be used, e.g., to assemble the different components of the AAV-ITR vectors and Rep vectors disclosed herein. These methods include, for example, in vitro recombinant DNA techniques, synthetic techniques, and in vivo genetic recombination.

[0588] In some aspects, an AAV-ITR based gene delivery system of the present disclosure can be use to transfect a host cell by conventional techniques and the resulting cell can then be cultured by conventional techniques to produce a therapeutic protein, peptide, or nucleic acid, e.g., an antibody (that, e.g., can be secreted), an enzyme (e.g., for a gene replacement therapy), or a peptide (e.g., a hormone, growth factor, cytokine, etc.).

[0589] In some aspects, the present disclosure provides a host cell containing a polynucleotide integrated into its genome by using an AAV-ITR based gene delivery system of the present disclosure, wherein the polynucleotide encoding an antigen binding polypeptide or polypeptide complex comprising, e.g., comprising six CDRs, VH, VL, VH and VL, heavy chain, light chain, or heavy and light chain, or a domain thereof (e.g., one or more CDRs, VH, VL, VH and VL, heavy chain, or light chain). Such host-vector systems represent vehicles by which the coding sequences of interest can be produced and subsequently purified, but also represent cells which can, when transformed or transfected with the appropriate nucleotide coding sequences, express a polypeptide or polypeptide complex provided herein in situ.

[0590] In some aspects, the polynucleotide integrated into the genome of a host cell by using an AAV-ITR based gene delivery system of the present disclosure encodes both heavy and light chains, or a an antigen binding portion of an antibody. In some aspects, the antibody is a monospecific, bispecific, trispecific or tetraspecific antibody. In some aspects, the antibody is an MSTAR antibody. In some aspects, the polynucleotide integrated into the genome of a host cell by using an AAV-ITR based gene delivery system of the present disclosure encodes a CAR. In some aspects, the polynucleotide integrated into the genome of a host cell by using an AAV-ITR based gene delivery system of the present disclosure encodes a component of a gene editing systems or a combination thereof (e.g., a nuclease such as Cas, and a gRNA).

[0591] In some aspects, the AAV-ITR and/or Rep vector of the present disclosure can be produced in a variety of systems. These systems include but are not limited to microorganisms such as bacteria (e.g., E. coli and B. subtilis) transformed with recombinant bacteriophage DNA, plasmid DNA or cosmid DNA expression vectors containing antibody coding sequences; yeast (e.g., Saccharomyces, Pichia) transformed with recombinant yeast expression vectors containing antibody coding sequences; insect cell systems infected with recombinant virus expression vectors (e.g., baculovirus) containing antibody coding sequences; plant cell systems (e.g., green algae such as Chlamydomonas reinhardtii) infected with recombinant virus expression vectors (e.g., cauliflower mosaic virus, CaMV; tobacco mosaic virus, TMV) or transformed with recombinant plasmid expression vectors (e.g., Ti plasmid) containing AAV ITR_GOI sequences; or mammalian cell systems (e.g., COS (e.g., COS1 or COS), CHO, BHK, MDCK, HEK 293, NS0, PER.C6, VERO, CRL7030, HsS78Bst, HeLa, and NIH 3T3, HEK-293T, HepG2, SP210, R1.1, B-W, L-M, BSC1, BSC40, YB/20, and BMT10 cells) harboring recombinant expression constructs containing promoters derived from the genome of mammalian cells (e.g., metallothionein promoter) or from mammalian viruses (e.g., the adenovirus late promoter; the vaccinia virus 7.5K promoter).

[0592] In some aspects, the AAV-ITR based gene delivery systems of the present disclosure cells can be used for the recombinant production of a gene of interest (e.g., a polypeptide or polypeptide complex) described herein in CHO cells, for example CHO cells from the CHO GS System™ (Lonza). In some aspects, cells for expressing the polypeptides or polypeptide complexes provided herein are human cells, e.g., human cell lines. In some aspects, a mammalian expression vector is pOptiVEC™ or pcDNA3.3. In some aspects, eukaryotic cells (e.g., mammalian cells) are used for the expression of recombinant polypeptides. For example, mammalian cells such as Chinese hamster ovary (CHO) cells in conjunction with a vector such as the major intermediate early gene promoter element from human cytomegalovirus is an effective expression system for polypeptides (Foecking M K & Hofstetter H (1986) Gene 45: 101-105; and Cockett M I et al., (1990) Biotechnology 8: 662-667). In some aspects, the polypeptides or polypeptide complexes provided herein are produced by HEK-293T cells.

[0593] In addition, a host cell strain can be chosen which modulates the expression of the inserted sequences, or modifies and processes the gene product in the specific fashion desired. Such modifications (e.g., glycosylation) and processing (e.g., cleavage) of protein products can contribute to the function of the protein. To this end, eukaryotic host cells that possess the cellular machinery for proper processing of the primary transcript, glycosylation, and phosphorylation of the gene product can be used. Such mammalian host cells include but are not limited to CHO, VERO, BHK, Hela, MDCK, HEK 293, NIH 3T3, W138, BT483, Hs578T, HTB2, BT20 and T47D, NS0 (a murine myeloma cell line that does not endogenously produce any immunoglobulin chains), CRL7030, COS (e.g., COS1 or COS), PER.C6, VERO, HsS78Bst, HEK-293T, HepG2, SP210, R1.1, B-W, L-M, BSC1, BSC40, YB/20, BMT10 and HsS78Bst cells.

[0594] Once a polypeptide or polypeptide complex provided herein has been produced by recombinant expression, it can be purified by any method known in the art for purification of a protein or immunoglobulin molecule, for example, by chromatography (e.g., ion exchange, affinity, particularly by affinity for the specific antigen after Protein A, and size exclusion chromatography), centrifugation, differential solubility, or by any other standard technique for the purification of proteins. Further, the polypeptides or polypeptide complexes provided herein can be fused to heterologous polypeptide sequences provided herein (e.g., peptide tags) or otherwise known in the art to facilitate purification.

[0595] In some aspects, a polypeptide or polypeptide complex provided herein can be isolated or purified. Generally, an isolated polypeptide or polypeptide complex is one that is substantially free of other polypeptides or polypeptide complexes with different antigenic specificities. For example, in some aspects, a preparation of a polypeptide or polypeptide complex described herein can be substantially free of cellular material and/or chemical precursors.

### Pharmaceutical Composition

[0596] The present disclosure provides pharmaceutical compositions comprising AAV-ITR based gene delivery system of the present disclosure. In some aspects, the pharmaceutical composition comprises a pharmaceutically acceptable carrier. In some aspects, provided herein is a pharmaceutical composition comprising a double stranded polynucleotide encoding a gene of Interest (GOI) within an AAV-ITR vector of the present disclosure. In some aspects, the pharmaceutical composition further comprises a Rep vector of the present disclosure. In some aspects, the pharmaceutical composition in encapsulated in a lipidic delivery system (e.g., a LNP or liposome) or combination thereof

[0597] In a specific aspect, a pharmaceutical composition provided herein comprises (1) an AAV-ITR vector encoding a GOI; (2) a Rep68 vector or Rep78 vector; and (3) a pharmaceutically acceptable carrier. In a specific aspect, a pharmaceutical composition provided herein comprises (1) an AAV-ITR vector encoding a CAR; (2) a Rep68 vector or Rep78 vector; and (3) a pharmaceutically acceptable carrier. In a specific aspect, a pharmaceutical composition provided herein comprises (1) an AAV-ITR vector encoding an antibody, e.g., a MSTAR antibody; (2) a Rep68 vector or Rep78 vector; and (3) a pharmaceutically acceptable carrier.

[0598] In some aspects, the AAV-ITR vector is encapsulated in a lipidic delivery system (e.g., a LNP or liposome). In some aspects, the Rep68 vector or Rep78 vector is encapsulated in a lipidic delivery system (e.g., a LNP or liposome). In some aspects, the AAV-ITR vector is encapsulated in a first lipidic delivery system (e.g., a LNP or liposome) and the Rep68 vector or Rep78 vector is encapsulated in a second lipidic delivery system (e.g., a LNP or liposome). In some aspects, the first and second lipidic delivery systems are the same. In some aspects, the first and second lipidic delivery systems are different.

[0599] Thus, is some aspects, the pharmaceutical composition of the present disclosure comprises (1) an AAV-ITR vector of the present disclosure encapsulated in a first lipidic delivery system (e.g., a LNP or liposome) and (2) a Rep vector (e.g., Rep78 vector) of the present disclosure encapsulated in a second lipidic delivery system (e.g., a LNP or liposome).

[0600] The term “pharmaceutically acceptable carrier” includes any and all solvents, co-solvents, complexing agents, dispersion media, coatings, antibacterial and antifungal agents, isotonic and absorption delaying agents, and the like, which are not biologically or otherwise undesirable. The use of such media and agents for pharmaceutically active substances is known in the art. Except insofar as any conventional media or agent is incompatible with the active ingredient, its use in the therapeutic formulations is contemplated. Supplementary active ingredients can also be incorporated into the pharmaceutical compositions provided herein. In addition, various excipients, such as are commonly used in the art, can be included. These and other such compounds are described in the literature, e.g., in the Merck Index, Merck & Company, Rahway, NJ. Considerations for the inclusion of various components in pharmaceutical compositions are described, e.g., in Gilman et al. (Eds.) (2010); Goodman and Gilman's: The Pharmacological Basis of Therapeutics, 12th Ed., The McGraw-Hill Companies. In some aspects, the pharmaceutical composition is for parenteral, intravenous or subcutaneous administration.

[0601] Once a pharmaceutical composition has been formulated, it can be stored in sterile vials as a solution, suspension, gel, emulsion, solid, crystal, or as a dehydrated or lyophilized powder. Such formulations can be stored either in a ready-to-use form or in a form (e.g., lyophilized) that is reconstituted prior to administration.

### Kits

[0602] The present disclosure provides a kit comprising (1) an AAV-ITR based gene delivery system of the present disclosure, or one or more of its components, or a pharmaceutical compositions disclosed herein, and (2) optionally instructions for use, e.g., instruction to replace a GOI integrated in an AAV-ITR vector included in the kit with a GOI of interest to the user of the kit. In some aspects, the kit comprises an AAV-ITR based gene delivery system of the present disclosure. In some aspects, the kit comprises an AAV-ITR vector disclosed herein. In some aspects, the kit comprises a Rep vector disclosed herein. In some aspects, the kit comprises an AAV-ITR and a Rep vector disclosed herein, wherein the AAV-ITR vector and/or Rep vector are encapsulated in a lipidic delivery system (e.g., a LNP or liposome).

[0603] In some aspects, the kit comprises (1) an AAV-ITR and/or a Rep vector disclosed herein and (2) optionally instructions for the encapsulation of the AAV-ITR and/or Rep vector.

### METHODS OF USE

[0604] The present disclosure provides method of treating or preventing a disease or disorder in a subject in need thereof comprising administering to the subject an AAV-ITR based gene delivery system of the present disclosure. In some aspects, the present disclosure provides a gene therapy method comprising administering an AAV-ITR based gene delivery system of the present disclosure to a subject in need thereof. In some aspects, the gene therapy is long-term gene therapy. In some aspects, the gene is short-term gene therapy. In some aspects, the gene therapy is in vivo. In some aspects, the gene therapy is ex vivo.

[0605] In some aspects, the AAV-ITR vector comprises a double-stranded DNA encoding a gene of interest, e.g., a protein (e.g., an enzyme, a growth factor, a hormone, a CAR, or an antibody, or a component of a gene editing system) or a nucleic acid (e.g., a miRNA, an antisense oligonucleotide, or a gRNA). In some aspects, the AAV-ITR vector comprises a double stranded DNA encoding an mRNA, a miRNA, a gRNA, or a combination thereof.

[0606] The present disclosure also provides a CAR-T cell therapy method comprising administering a AAV-ITR based gene delivery system of the present disclosure to the subject, wherein the AAV-ITR vector comprising a double stranded polynucleotide encoding a CAR protein. In some aspects, the AAV-ITR based gene delivery system of the present disclosure comprises a lipidic delivery system (e.g., a LNP or liposome) that has a neuron targeting protein integrated in the lipidic delivery system (e.g., a LNP or liposome) or covalently linked to the lipidic delivery system (e.g., a LNP or liposome). In some aspects, the AAV-ITR based gene delivery system of the present disclosure comprises a lipidic delivery system (e.g., a LNP or liposome) that has a T cell targeting protein integrated in the lipidic delivery system (e.g., a LNP or liposome) or covalently linked to the lipidic delivery system (e.g., a LNP or liposome). In some aspects, the AAV-ITR based gene delivery system of the present disclosure comprises a lipidic delivery system (e.g., a LNP or liposome) that has a B cell targeting protein integrated in the lipidic delivery system (e.g., a LNP or liposome) or covalently linked to the lipidic delivery system (e.g., a LNP or liposome). In some aspects, the AAV-ITR based gene delivery system of the present disclosure comprises a lipidic delivery system (e.g., a LNP or liposome) that has a lipid cell targeting protein integrated in the lipidic delivery system (e.g., a LNP or liposome) or covalently linked to the lipidic delivery system (e.g., a LNP or liposome). In some aspects, the AAV-ITR based gene delivery system of the present disclosure comprises a lipidic delivery system (e.g., a LNP or liposome) that has a muscle cell targeting protein integrated in the lipidic delivery system (e.g., a LNP or liposome) or covalently linked to the lipidic delivery system (e.g., a LNP or liposome). In some aspects, the AAV-ITR based gene delivery system of the present disclosure comprises a lipidic delivery system (e.g., a LNP or liposome) that has a lung cell targeting protein integrated in the lipidic delivery system (e.g., a LNP or liposome) or covalently linked to the lipidic delivery system (e.g., a LNP or liposome).

[0607] The present disclosure provides a method to target at least one gene of interest to a target cell or tissue comprising (i) encapsulating an AAV-ITR vector comprising a double stranded polynucleotide encoding at least one gene of interest (GOI) into a first lipidic delivery system (e.g., a LNP or liposome); (ii) encapsulating a Rep vector (e.g., encoding a Rep68 or Rep78 protein) in a second lipidic delivery system (e.g., a LNP or liposome); (iii) attaching a targeting molecule to the surface or the first and second lipidic delivery systems wherein the targeting molecule specifically binds to a surface protein (e.g., a receptor) on the surface of the target cell or tissue; and (iv) optionally attaching another payload to the surface of the first and/or second lipidic delivery system, and/or encapsulating another payload into the first and/or second lipidic delivery system.

[0608] In some aspects, a payload is attached to the inner surface of a lipidic delivery system (e.g., a LNP or liposome), attached to the outer surface or the lipidic delivery system (e.g., a LNP or liposome), transverses the lipid layer of the lipidic delivery system (e.g., a LNP or liposome), or, a combination thereof.

[0609] The present disclosure further provides a method of replicating a nucleic acid encoding a therapeutic polypeptide in a subject in need of treatment for a disease or condition. In some aspects, the method of replicating a nucleic acid encoding a therapeutic polypeptide in a patient in need of treatment for a disease or condition comprises administering to the subject a composition comprising an AAV-ITR vector comprising a polynucleotide encoding a GOI, wherein expression of the GOI improves at least one symptom of the disease or condition in the subject.

[0610] In some aspects, the method further comprises administering to the subject a composition comprising a Rep vector. In some aspects, the method comprises administering Rep vector, wherein the Rep vector comprises a Rep68 vector. In some aspects, the method comprises administering a Rep vector, wherein the Rep vector comprises a Rep78 vector. In some aspects, the method comprises administering an mRNA encoding Rep68. In some aspects, the method comprises administering an mRNA encoding Rep78. In some aspects, the method comprises administering to the subject a composition comprising an AAV-ITR vector comprising a double stranded polynucleotide sequence encoding a gene of interest, and a Rep vector comprising an mRNA encoding a Rep68 protein or a Rep78 protein.

[0611] In some aspects, the method of replicating a nucleic acid encoding a therapeutic polypeptide in a patient in need of treatment of a disease or condition comprises administering a combination of an AAV-ITR vector and a Rep vector (e.g., a Rep68 vector or Rep78 vector). In some aspects, the method comprises administering a combination of an AAV-ITR vector and a Rep68 vector. In some aspects, the method comprises administering a combination of an AAV-ITR vector and a Rep78 vector. In some aspects, the method comprises administering a combination of an AAV-ITR vector and a Rep68 mRNA.

[0612] In some aspects, the method of replicating a nucleic acid encoding a therapeutic polypeptide in a patient in need of treatment of a disease or condition comprises administering a combination of a composition comprising an AAV-ITR vector and a composition comprising a Rep68 vector and/or Rep 78 vector. In some aspects, the method comprises administering a combination of a composition comprising an AAV-ITR vector and a composition comprising a Rep68 vector. In some aspects, the method comprises administering a combination of a composition comprising an AAV-ITR vector and a composition comprising a Rep78 vector. In some aspects, the method comprises administering a combination of a composition comprising an AAV-ITR vector and a composition comprising a Rep68 mRNA. In some aspects, the method comprises administering a combination of an AAV-ITR vector and a composition comprising a Rep78 mRNA.

[0613] In some aspects, the method of replicating a nucleic acid encoding a therapeutic polypeptide in a patient in need of treatment of a disease or condition comprises administering a composition comprising (i) an AAV-ITR vector and (ii) a Rep vector (e.g., Rep68 vector or Rep78 vector). In some aspects, the method comprises administering a composition comprising an AAV-ITR vector and a Rep68 vector. In some aspects, the method comprises administering a composition comprising an AAV-ITR vector and a Rep78 vector. In some aspects, the method comprises administering a composition comprising an AAV-ITR vector and a composition comprising a Rep68 mRNA. In some aspects, the method comprises administering a composition comprising an AAV-ITR vector and a Rep78 mRNA. In some aspects, the method comprises administering a combination of a composition comprising an AAV-ITR vector and a composition comprising a Rep vector, wherein the composition comprising the AAV-ITR vector and the composition comprising the Rep vector are administered at the same time. In some aspects, the composition comprising the AAV-ITR vector and the composition comprising the Rep IVT vector are administered consecutively. In some aspects, the composition comprising the AAV-ITR vector is administered before the composition comprising the Rep vector. In some aspects, the composition comprising the Rep vector is administered before the composition comprising the AAV-ITR vector. In some aspects, the composition comprising an AAV-ITR and the composition comprising a Rep vector are administered within a time period of 1 minute, 2 minutes, 5 minutes, 10 minutes, 20 minutes, 30 minutes, 45 minutes, 1 hour, 1.5 hours, 2 hours, 2.5 hours, 3 hours, 3.5 hours, 4 hours, 4.5 hours, 5 hours, 5.5 hours, or 6 hours.

[0614] In some aspects, the method of replicating a nucleic acid encoding a therapeutic polypeptide in a patient in need of treatment of a disease or condition comprises administering a combination of a composition comprising an AAV-ITR vector and a composition comprising a Rep vector, wherein both compositions are present within a delivery system. In some aspects, the delivery system is a lipid nanoparticle (LNP). In some aspects, the delivery system is a liposome. In some aspects, the delivery system is a cationic lipid liposome. In some aspects, the delivery system is a polymeric delivery platform. In some aspects, the method of replicating a nucleic acid encoding a therapeutic polypeptide in a patient in need of treatment of a disease or condition comprises administering a combination of a composition comprising an AAV-ITR vector and a composition comprising a Rep vector, e.g., a Rep68 vector or a Rep78 vector, wherein the two compositions are present within different delivery systems. In some aspects, a composition comprising an AAV-ITR vector is present in a LNP delivery system or a liposome delivery system. In some aspects, a composition comprising a Rep vector is present in a LNP delivery system or a liposome delivery system.

[0615] In some aspects, an AAV-ITR vector is administered to a subject in need thereof in an LNP. In some aspects, a Rep vector is administered to a subject in need thereof in an LNP. In some aspects, an AAV-ITR vector is administered to a subject in need thereof in a liposome. In some aspects, a Rep vector is administered to a subject in need thereof in a liposome. In some aspects, an AAV-ITR vector is administered to a subject in need thereof in a cationic liposome. In some aspects, a Rep vector is administered to a subject in need thereof in a cationic liposome. In some aspects, an AAV-ITR is administered to a subject in need thereof in a polymeric delivery system. In some aspects, a Rep vector is administered to a subject in need thereof in a polymeric delivery system. In some aspects, an AAV-ITR vector is administered to a subject in need thereof in an LNP and a Rep vector is administered to the subject in a liposome. In some aspects, an AAV-ITR vector is administered to a subject in need thereof in a liposome and a Rep vector is administered to the subject in an LNP. In some aspects, an AAV-ITR vector is administered to a subject in need thereof in an LNP and a Rep vector is administered to the subject in a cationic liposome. In some aspects, an AAV-ITR vector is administered to a subject in need thereof in a cationic liposome and a Rep vector is administered to the subject in an LNP. In some aspects, an AAV-ITR vector is administered to a subject in need thereof in an LNP and a Rep vector is administered to the subject in a polymeric delivery system. In some aspects, an AAV-ITR vector is administered to a subject in need thereof in a polymeric delivery system and a Rep vector is administered to the subject in an LNP.

[0616] As used herein, the terms “prevent” or “preventing” refer to the prevention of the onset, recurrence or spread, in whole or in part, of a disease or condition provided herein, or a symptom thereof.

[0617] As used herein, the terms “treat” or “treatment” refer to therapeutic or palliative measures. Beneficial or desired clinical results include, but are not limited to, alleviation, in whole or in part, of symptoms associated with a disease or disorder or condition, diminishment of the extent of disease, stabilized (i.e., not worsening) state of disease, delay or slowing of disease progression, amelioration or palliation of the disease state (e.g., one or more symptoms of the disease), and remission (whether partial or total), whether detectable or undetectable. “Treatment” can also mean prolonging survival as compared to expected survival if not receiving treatment.

[0618] As used herein, “administering” is meant a method of giving a dosage of AAV-ITR based gene delivery system of the present disclosure comprising one or more therapeutic agents (e.g., DNA and/or mRNA) to a subject in need thereof (e.g., a patient). Administering can be by any suitable means, including parenteral, intrapulmonary or intranasal. Parenteral infusions include, for example, intramuscular, intravenous, intraarterial, intraperitoneal or subcutaneous administration. Dosing can be by any suitable route, e.g., by injection, such as intravenous or subcutaneous injection. Various dosing schedules including, but not limited to, single or multiple administrations over various time-points, bolus administration, and pulse infusion are contemplated herein.

[0619] As used herein, a “therapeutically effective amount” is an amount of an AAV-ITR based gene delivery system of the present disclosure comprising one or more therapeutic agents (e.g., an mRNA encoding a gene of interest) that is sufficient to achieve the desired effect and can vary according to the nature and severity of the condition, and the potency of the AAV-ITR based gene delivery system of the present disclosure comprising one or more therapeutic agents (e.g., DNA and/or mRNA).

[0620] A therapeutic effect is the relief, to at least some extent, of one or more symptoms of the disease or disorder, and can include curing a disease or disorder. “Curing” means that the symptoms of active disease are eliminated. However, certain long-term or permanent effects of a disease or disorder can exist even after a cure is obtained.

[0621] As used herein, the term “subject” means a human or a non-human mammal, e.g., a dog, cat, mouse, rat, cow, sheep, pig, goat, non-human primate or bird, e.g., chicken, as well as any other vertebrate or invertebrate. In some aspects, the subject is a human. In some aspects, the subject is a veterinary animal. In some aspects, the subject is a mammal. In some aspects, the terms subject and patient are used interchangeably.

[0622] In some aspects, the present disclosure provides a method of treating cancer. In some aspects, the cancer is a hematologic cancer. In some aspects, the hematologic cancer is a lymphoma, myeloma, or leukemia. In some aspects, the lymphoma is a Hodgkin lymphoma or Non-Hodgkin lymphoma. In some aspects, the myeloma is a multiple myeloma, solitary plasmocytoma, or extamedullary plasmocytoma. In some aspects, the leukemia is an Acute Lynphocytic Leukemia (ALL), Chronic Lymphocytic Leukemia (CLL), Acute Myeloid Leukemia (AML), Chronic Myeloid Leukemia (CML), Hairy Cell Leukemia, Childhood Acute Lymphoblastic Leukemia, or Childhood Acute Myeloid Leukemia. In some aspects, the cancer is a solid cancer. In some aspects, the solid cancer is a breast cancer, colon cancer, kidney cancer, lung cancer, liver cancer, skin cancer, brain cancer, bladder cancer, prostate cancer, endometrial cancer, pancreatic cancer, or thyroid cancer.

[0623] In some aspects, the present disclosure provides a method for treating an immune disease. In some aspects, the immune disease is artherosclosis, Lyme disease, or fibromyalgia. In some aspects, the immune disease is an autoimmune disease. In some aspects, the autoimmune disease is Addison disease, rheumatoid arthritis, inflammatory bowel disease, celiac disease, Hashimoto thyroiditis, Graves disease, Myasthenia gravis, multiple sclerosis, dermatomyositis, systemic lupus erythematosus, type I diabetes, Sjögren syndrome, Giant cell arteritis, reactive arthritis, pernicious anemia, alopecia areata, ankylosing spondylitis, antiphospholipid syndrome, Guillain-Barre syndrome, or psoriasis. In one aspect, the disease or disorder is a cancer, an inflammatory disease, a neurodegenerative disorder, a central nervous disease or a metabolic disease. In some aspects, a disease or disorder that can be treated with the present methods comprises a cancer, graft-versus-host disease (GvHD), autoimmune disease, infectious diseases, or fibrotic diseases. In some aspects, the disease or disorder is a cancer. When administered to a subject with a cancer, in certain aspects, a composition of the present disclosure can up-regulate an immune response and enhance the tumor targeting of the subject's immune system. In some aspects, the cancer being treated is characterized by infiltration of leukocytes (T-cells, B-cells, macrophages, dendritic cells, monocytes) into the tumor microenvironment, or so-called “hot tumors” or “inflammatory tumors.” In some aspects, the cancer being treated is characterized by low levels or undetectable levels of leukocyte infiltration into the tumor microenvironment, or so-called “cold tumors” or “non-inflammatory tumors.” In some aspects, the composition of the present disclosure is administered in an amount and for a time sufficient to convert a “cold tumor” into a “hot tumor,” i.e., said administering results in the infiltration of leukocytes (such as T-cells) into the tumor microenvironment. In certain aspects, cancer comprises bladder cancer, cervical cancer, renal cell cancer, testicular cancer, colorectal cancer, lung cancer, head and neck cancer, and ovarian, lymphoma, liver cancer, glioblastoma, melanoma, myeloma, leukemia, pancreatic cancers, or combinations thereof. In other aspects, the terms “distal tumor” or “distant tumor” refer to a tumor that has spread from the original (or primary) tumor to distant organs or distant tissues, e.g., lymph nodes. In some aspects, the composition of the present disclosure can treat a tumor after the metastatic spread.

[0624] In some aspects, the disease or disorder is a graft-versus-host disease (GvHD). In some aspects, the disease or disorder that can be treated with the present disclosure is an autoimmune disease. Non-limiting examples of autoimmune diseases include: multiple sclerosis, peripheral neuritis, Sjogren's syndrome, rheumatoid arthritis, alopecia, autoimmune pancreatitis, Behcet's disease, bullous pemphigoid, celiac disease, Devic's disease (neuromyelitis optica), glomerulonephritis, IgA nephropathy, assorted vasculitides, scleroderma, diabetes, arteritis, vitiligo, ulcerative colitis, irritable bowel syndrome, psoriasis, uveitis, systemic lupus erythematosus, and combinations thereof.

[0625] In some aspects, a disease or disorder that can be treated with the present methods comprises a Pompe disease, Gaucher, a lysosomal storage disorder, mucovicidosis, cystic fibrosis, Duchenne and Becker muscular dystrophy, transthyretin amyloidosis, hemophilia A, hemophilia B, adenosine-deaminase deficiency, Leber's congenital amaurosis, X-linked adrenoleukodystrophy, metachromatic leukodystrophy, OTC deficiency, glycogen storage disease 1A, Criggler-Najjar syndrome, primary hyperoxaluria type 1, acute intermittent porphyria, phenylketonuria, familial hypercholesterolemia, mucopolysaccharidosis type VI, al antitrypsin deficiency, Retts Syndrome, Dravet Syndrome, Angelman Syndrome, DM1 disease, Fragile X disease, Huntingtons Disease, Friedreichs ataxia, CMT disease (also known as Charcot-Marie-Tooth disease, hereditary motor and sensory neuropathy (HMSN), or peroneal muscular atrophy), CMT1X disease, catecholaminergic polymorphic ventricular tachycardia, spinocerebellar ataxia type 3 (SCA3) disease, limb-girdle muscular dystrophy, or a hypercholesterolemia. In some aspects, the treatment is prophylactic.

[0626] In some aspects, the disease or disorder is a neurodegenerative disease. In some aspects, the neurodegenerative disease is selected from Alzheimer's disease, Parkinson's disease, prion disease, motor neuron disease, Huntington's disease, spinocerebellar ataxia, spinal muscular atrophy, and any combination thereof.

[0627] In certain aspects, the disease or disorder comprises a muscular dystrophy. In some aspects, the muscular dystrophy is selected from Duchenne type muscular dystrophy (DMD), myotonic muscular dystrophy, facioscapulohumeral muscular dystrophy (FSHD), congenital muscular dystrophy, limb-girdle muscular dystrophy (including, but not limited to, LGMD2B, LGMD2D, LGNMD2L, LGMD2C, LGMD2E and LGMD2A), and any combination thereof.

[0628] In some aspects, the disease or disorder is selected from AADC deficiency (CNS), ADA-SCID, Alpha-1 antitrypsin deficiency, β-thalassemia (severe sickle cell), Cancer (head and neck squamous cell), Niemman-Pick Type C Disease, Cerebral ALD, Choroideremia, Congestive heart failure, Cystic Fibrosis, Duchenne muscular dystrophy (DMD), Fabry disease, Glaucoma, Glioma (cancer), Hemophilia A, Hemophilia B, HoFH (hypercholesterolemia), Huntington's Disease, Lipoprotein lipase deficiency, Leber hereditary optic neuropathy (LHON), Metachromatic leukodystrophy, MPS I (Hurler syndrome), MPS II (Hunter's syndrome), MPS III (Sanfilippo Syndrome), Parkinson's disease, Pompe Disease, Recessive Dystrophic Epidermolysis Bullosa, RPE65 deficiency (vision loss), Spinal Muscular Atrophy (SMA I), Wet AMD (retinal disease), Wiskott Aldrich syndrome (WAS), Mucopolysaccharidosis type IIIA (MPS IIIA), X-linked myotubular myopathy, X-linked retinitis pigmentosa, and any combination thereof.

### EMBODIMENTS

[0629] In the text below the term “Ex,” wherein x is an integer, refers to an embodiment of the present invention. Thus, e.g., E1 represents Embodiment 1.

[0630] E1 comprises an AAV-ITR based gene delivery system comprising a composition, optionally capsid-free, comprising (i) a linear dsDNA AAV-ITR vector comprising 5′ and 3′ AAV ITR flanking a polynucleotide sequence encoding a therapeutic polypeptide, a therapeutic polynucleotide, or a combination thereof, and, (ii) a mRNA Rep vector encoding a Rep protein. E2 comprises the AAV-ITR based gene delivery system of embodiment E1, wherein the ITR comprises an ITR sequence from AAV1, AAV2, AAV3, AAV3B, AAV4, AAV5, AAV6, AAV7, AAV8, AAV9, AAV10, AAV11, AAV12, AAV13, an ortholog parvoviral ITR, or a functional fragment of functional variant thereof. E3 comprises the AAV-ITR based gene delivery system of embodiment E1 or E2, wherein the AAV-ITR vector comprises a regulatory element or a combination thereof. E4 comprises the AAV-ITR based gene delivery system of embodiment E2, wherein the regulatory element comprises a promoter. E5 comprises the AAV-ITR based gene delivery system of embodiment E4, wherein the promoter is selected from the group consisting of a CMV promoter, a SV40 promoter, an AdMLP, a polyoma promoter, a β-globin promoter, an SRa promoter, a U6 promoter, a CBA promoter, a CAG promoter, an UBC promoter, a β glucuronidase promoter, an NSE promoter, a Synapsin promoter, a MeCP2 promoter, an EF 1a promoter, and a GFAP promoter.

[0631] E6 comprises the AAV-ITR based gene delivery system of embodiment E4, wherein the promoter is a tissue-specific promoter. E7 comprises the AAV-ITR based gene delivery system of embodiment E6, wherein the tissue-specific promoter is selected from the group consisting of a muscle-specific promoter, a B cell promoter, a monocyte promoter, a leukocyte promoter, a macrophage promoter, a pancreatic acinar cell promoter, an endothelial cell promoter, a lung tissue promoter, an astrocyte promoter, and a nervous system promoter. E8 comprises the AAV-ITR based gene delivery system of embodiment E7, wherein the muscle-specific promoter is selected from the group consisting of an MCK promoter, a DES promoter, a TNNI2 promoter, an hAAT promoter, a TBG promoter, and an ASKA promoter. E9 comprises the AAV-ITR based gene delivery system of embodiment E7, wherein the tissue-specific promoter is a nervous system promoter selected from the group consisting of a NSE promoter, a PDGF promoter, a PDGF-β promoter, a Syn promoter, a MeCP2 promoter, a CaMKII promoter, a mGluR2 promoter, a NFL or NFH promoter, a flP2 promoter, a PPE promoter, an Enk promoter, an EAAT2 promoter, a GFAP promoter and a MBP promoter.

[0632] E10 comprises the AAV-ITR based gene delivery system of embodiment E4, wherein the promoter is a CMV promoter. E11 comprises the AAV-ITR based gene delivery system of embodiment E3, wherein the regulatory element comprises an enhancer. E12 comprises the AAV-ITR based gene delivery system of embodiment E11, wherein the enhancer is selected from the group consisting of a CMV enhancer, an SV40 enhancer, an AdMLP enhancer, and a polyoma enhancer. E13 comprises the AAV-ITR based gene delivery system of embodiment E11, wherein the enhancer is a CMV enhancer. E14 comprises the AAV-ITR based gene delivery system of embodiment E3, wherein the regulatory element comprises an intron. E15 comprises the AAV-ITR based gene delivery system of embodiment E14, wherein the intron is selected from the group consisting of an MVM intron, an FIX truncated intron 1, a β-globin SD/immunoglobulin heavy chain splice acceptor, an adenovirus splice donor/immunoglobin splice acceptor, a SV40 late splice donor/splice acceptor (19S/16S), and a hybrid adenovirus splice donor/IgG splice acceptor.

[0633] E16 comprises the AAV-ITR based gene delivery system of embodiment E3, wherein the regulatory element comprises a polyadenylation (Poly A) tail. E17 comprises the AAV-ITR based gene delivery system of embodiment E16, wherein the Poly A tail is selected from the group consisting of a Poly A of bovine growth hormone (BGH) mRNA, a rabbit beta-globin Poly A, and an SV40 Poly A. E18 comprises the AAV-ITR based gene delivery system of embodiment E17, wherein the Poly A tail is a BGH Poly A tail. E19 comprises the AAV-ITR based gene delivery system of embodiment E1, wherein the topology of the AAV-ITR vector corresponds to Schema I: [ITRL]-[E]-[P]-[I]-[GOI]-[P(A) signal]-[ITRR] wherein: ITRL and ITRR are ITRs, and ITRR is the reverse complement if ITRL; E is an enhancer; P is a promoter; I is an intron; GOI is a polynucleotide sequence encoding a therapeutic polypeptide, a therapeutic polynucleotide, or a combination thereof, and, P(A) signal is a polyadenylation signal. E20 comprises the AAV-ITR based gene delivery system of embodiment E1, wherein the Rep vector comprises a promoter.

[0634] E21 comprises the AAV-ITR based gene delivery system of embodiment E20, wherein the promoter is a T7 promoter. E22 comprises the AAV-ITR based gene delivery system of embodiment E1, wherein the Rep vector comprises a 5′ UTR. E23 comprises the AAV-ITR based gene delivery system of embodiment E22, wherein the 5′ UTR is selected from the 5′ UTR sequences of SEQ ID NOS: 388 to 405. E24 comprises the AAV-ITR based gene delivery system of embodiment E1, wherein the Rep vector comprises a 3′ UTR. E25 comprises the AAV-ITR based gene delivery system of embodiment E24, wherein the 3′ UTR is selected from the group consisting of 3′ UTR sequences of SEQ ID NOS: 406 to 423. E26 comprises the AAV-ITR based gene delivery system of embodiment E1, wherein the Rep vector comprises a Poly A tail. E27 comprises the AAV-ITR based gene delivery system of embodiment E26, wherein the Poly A tail is about 80 to about 250 nucleotides long. E28 comprises the AAV-ITR based gene delivery system of embodiment E26, wherein the Poly A tail is about 80, about 90, about 100, about 110, about 120, about 130, about 140, about 150, about 160, about 170, about 180, about 190, about 200, about 210, about 220, about 230, about 240 or about 250 nucleotides long.

[0635] E29 comprises the AAV-ITR based gene delivery system of embodiment E1, wherein the Rep vector comprises an mRNA encoding an AAV Rep protein. E30 comprises the AAV-ITR based gene delivery system of embodiment E29, wherein the AAV Rep protein comprises a Rep78 protein, a Rep68 protein, a variant thereof, or a functional fragment thereof. E31 comprises the AAV-ITR based gene delivery system of embodiment E30, wherein the AAV Rep protein is an AAV Rep78 protein from AAV1, AAV2, AAV3, AAV3B, AAV4, AAV5, AAV6, AAV7, AAV8, AAV9, AAV10, AAV 11, AAV12, or AAV13, a variant thereof, or a functional fragment thereof. E32 comprises the AAV-ITR based gene delivery system of embodiment E30, wherein the AAV Rep protein is an AAV Rep58 protein from AAV1, AAV2, AAV3, AAV3B, AAV4, AAV5, AAV6, AAV7, AAV8, AAV9, AAV10, AAV11, AAV12, or AAV13, a variant thereof, or a functional fragment thereof. E33 comprises the AAV-ITR based gene delivery system of embodiment E1, wherein the topology of the Rep vector corresponds to Schema II. [P]-[5′ UTR]-[Rep78/68]-[3′ UTR]-[P(A) tail] wherein: P is a promoter; 5′ UTR is a 5′ untranslated region; 3′ UTR is a 3′ untranslated region; Rep78/68 is a polynucleotide sequence encoding a Rep78 or Rep68 protein; and, P(A) tail is a polyadenylation tail.

[0636] E34 comprises the AAV-ITR based gene delivery system of embodiment E1, wherein the polynucleotide sequence encoding a therapeutic polypeptide, a therapeutic polynucleotide, or a combination thereof encodes a therapeutic polypeptide. E35 comprises the AAV-ITR based gene delivery system of embodiment E1, wherein the polynucleotide sequence encoding a therapeutic polypeptide, a therapeutic polynucleotide, or a combination thereof encodes a therapeutic polynucleotide. E36 comprises the AAV-ITR based gene delivery system of embodiment E1, wherein the polynucleotide sequence encoding a therapeutic polypeptide, a therapeutic polynucleotide, or a combination thereof encodes a therapeutic polypeptide and a therapeutic polynucleotide. E37 comprises the AAV-ITR based gene delivery system of embodiment E1, wherein the polynucleotide sequence encoding a therapeutic polypeptide, a therapeutic polynucleotide, or a combination thereof comprises at least two cistrons.

[0637] E38 comprises the AAV-ITR based gene delivery system of embodiment E37, wherein the polynucleotide sequence comprises an IRES element, a 2A element, or a combination thereof. E39 comprises the AAV-ITR based gene delivery system of embodiment E38, wherein the polynucleotide sequence comprises an IRES element interposed between two cistrons. E40 comprises the AAV-ITR based gene delivery system of embodiment E38, wherein the polynucleotide sequence comprises a 2A element interposed between two cistrons. E41 comprises the AAV-ITR based gene delivery system of embodiment E40, wherein the 2A element comprises a P2A element (porcine teschovirus-1 2A), a F2A element (foot-and-mouth disease virus), E2A element (equine rhinitis A virus), or T2A element (thosea asigna virus 2A). E42 comprises the AAV-ITR based gene delivery system of embodiment E38, wherein the polynucleotide sequence comprises a 2A element that is a tandem P2A-T2A element.

[0638] E43 comprises the AAV-ITR based gene delivery system of embodiment E38, wherein the polynucleotide sequence comprises a 2A element that is a tandem 2A-T2A-E2A element. E44 comprises the AAV-ITR based gene delivery system of embodiment E1, wherein the polynucleotide sequence encodes an antibody, an enzyme, a receptor, an ion channel, a vaccine antigen, a CAR, a hormone, a cytokine, a growth factor, or an apoptosis regulator. E45 comprises the AAV-ITR based gene delivery system of embodiment E44, wherein the polynucleotide sequence encodes an antibody. E46 comprises the AAV-ITR based gene delivery system of embodiment E45, wherein the antibody is monospecific, bispecific, trispecific, or tetraspecific. E47 comprises the AAV-ITR based gene delivery system of embodiment E45, wherein the antibody is an MSTAR antibody. E48 comprises the AAV-ITR based gene delivery system of embodiment E45, wherein the antibody is a neutralizing SARS-CoV2, influenza virus, or HIV virus antibody. E49 comprises the AAV-ITR based gene delivery system of embodiment E1, wherein the polynucleotide sequence encodes GLP-1 and/or a GLP-1 agonist. E50 comprises the AAV-ITR based gene delivery system of embodiment E49, wherein the GLP-1 is GLP-1 (7-37).

[0639] E51 comprises the AAV-ITR based gene delivery system of embodiment E49, wherein the GLP-1 agonist is selected from exenatide, liraglutide, lixisenative, taspoglutide, albiglutide, dulaglutide, emaglutide, and semaglutide. E52 comprises the AAV-ITR based gene delivery system of embodiment E1, wherein the wherein the polynucleotide sequence encodes a GIP agonist. E53 comprises the AAV-ITR based gene delivery system of embodiment E1, wherein the polynucleotide sequence encodes a vaccine antigen. E54 comprises the AAV-ITR based gene delivery system of embodiment E53, wherein the vaccine antigen is a viral, bacterial, or protozoan protein or fragment or variant thereof to treat COVID-19 (SARS-CoV2 infection), HIV infection, influenza, RSV infection, rabies, HPV infection, malaria, EBV infection, tuberculosis, CMV infection, Herpes zoster, Zika virus infection, HBV infection, yellow fever, PIV infection, hMPV infection, rotavirus infection, Nipah virus infection or Chikungunya virus infection. In some aspects, the dsDNA encodes a neutralizing antibody to treat, e.g., COVID-19 (SARS-CoV2 infection), HIV infection, influenza, RSV infection, rabies, HPV infection, malaria, EBV infection, tuberculosis, CMV infection, Herpes zoster, Zika virus infection, HBV infection, yellow fever, PIV infection, hMPV infection, rotavirus infection, Nipah virus infection or Chikungunya virus infection. E55 comprises the AAV-ITR based gene delivery system of embodiment E1, wherein the polynucleotide sequence encodes a gene product for replacement therapy selected from the group consisting of AAT, ABCB4, ACADVL, ARG1, ATP8B1, C2, CFTR, citrin, CNTF, CPS1, CTNS, G6PT1, GALT, GLA, HPRT, JAG1, LPL, MCAD, MCM, PBGD, REP1, RPE65, RS1, and TTR. E56 comprises the AAV-ITR based gene delivery system of embodiment E1, wherein the polynucleotide sequence encodes the gene of interest in a gene therapy agent selected from the group consisting of alipogene tiparvovec (GLYBERA™), atidarsagene autotemcel (LIBMELDY™), axicabtagene ciloleucel (YESCARTA™), beremagene geperpavec (VYJUVEK™), betibeglogene autotemcel (ZYNTEGLO™), brexucabtagene autoleucel (TECARTUS™), cambiogenplasmid (NEOVASCULGEN™), ciltacabtagene autoleucel (CARVYKTI™), delandistrogene moxeparvovec (ELEVIDYS™), elivaldogene autotemcel (SKYSONA™), etranacogene dezaparvovec (HEMGENIX™), gendicine, vicleucel (ABECMA™), lisocabtagene maraleucel (BREYANZI™), nadofaragene firadenovec (ADSTILADRIN™), onasemnogene abeparvovec (ZOLGENSMA™), strimvelis, talimogene laherparepvec (IMLYGIC™), tisagenlecleucel (KYMRIAH™), valoctocogene roxaparvovec (ROCTAVIAN™), and voretigene neparvovec (LUXTURNA™).

[0640] E57 comprises the AAV-ITR based gene delivery system of any one of embodiments E1 to E56, wherein the AAV-ITR vector and Rep vector are encapsulated in a lipidic delivery system, polymeric delivery system, or a combination thereof. E58 comprises the AAV-ITR based gene delivery system of embodiment E57, wherein the lipidic delivery system comprises a cationic or ionizable lipid or lipidoid; a structural lipid; a helper lipid; a stabilizing lipid; or, a combination thereof. E59 comprises the AAV-ITR based gene delivery system of embodiment E58, wherein the ionizable lipid or lipidoid is selected from the group consisting of cKK-E12, AIC-0315, SM-102, YK-009, DLin-MC3-DMA (MC3), DLin-KC2-DMA (KC2), A6, OF-02, A18-Iso5-2DC18, 98N12-5, 9A1p9, C12-200, 7C1, G0-C14, L319, 304O13, OF-Deg-Lin, 306-O12B, 306O110, FTT5, Lipid 10, and combinations thereof. E60 comprises the AAV-ITR based gene delivery system of embodiment E58, wherein the cationic lipid is DOTAP or DOTMA. E61 comprises the AAV-ITR based gene delivery system of embodiment E58, wherein the structural lipid is a sterol.

[0641] E62 comprises the AAV-ITR based gene delivery system of embodiment E61, wherein the sterol is selected from the group consisting of cholesterol, beta-cholesterol, ergosterol, 7-dehydrocholesterol, 24S-hydroxycholesterol, lanosterol, cycloartenol, fucosterol, saringosterol, campesterol, 0-sitosterol, sitostanol, coprostanol, avenasterol, stigmasterol, and any combination thereof. E63 comprises the AAV-ITR based gene delivery system of embodiment E61, wherein the sterol is cholesterol. E64 comprises the AAV-ITR based gene delivery system of embodiment E58, wherein the helper lipid comprises at least one symmetric phospholipid, asymmetric lipid, lysolipid, fatty acid, or a combination thereof. E65 comprises the AAV-ITR based gene delivery system of embodiment E64, wherein the symmetric phospholipid comprises a phosphocholine (PC). E66 comprises the AAV-ITR based gene delivery system of embodiment E65, wherein the PC is selected from the group consisting of DSPC, DOPC, DLPV, DMPC, and any combination thereof. E67 comprises the AAV-ITR based gene delivery system of embodiment E64, wherein the symmetric phospholipid comprises a phosphoethanolamine (PE).

[0642] E68 comprises the AAV-ITR based gene delivery system of embodiment E67, wherein the PE is the selected from the group consisting of DSPE, DOPE, DLPE, DMPE, and a combination thereof. E69 comprises the AAV-ITR based gene delivery system of embodiment E58, where the stabilizing lipid comprises a PEG-lipid. E70 comprises the AAV-ITR based gene delivery system of embodiment E69, where the PEG-lipid is a PEG-modified phosphatidylethanolamine, a PEG-modified phosphatidic acid, a PEG-modified ceramide, a PEG-modified dialkylamine, a PEG-modified diacylglycerol, a PEG-modified dialkylglycerol, or a combination thereof. E71 comprises the AAV-ITR based gene delivery system of embodiment E69, wherein the PEG-lipid is selected from the group consisting of PEG-c-DOMG, PEG-DMG, PEG-DLPE, PEG-DMPE, PEG-DPPC, PEG-DSPE, and any combination thereof. E72 comprises the AAV-ITR based gene delivery system of embodiment E69, wherein PEG-lipid is selected from the group consisting of DMG-PEG2000, DSPE-PEG2000, and a combination thereof. E73 comprises the AAV-ITR based gene delivery system of any one of embodiments E58 to E72, wherein the lipidic delivery system comprises a lipid nanoparticle, a liposome, or a combination thereof. E74 comprises the AAV-ITR based gene delivery system of embodiment E73, wherein the liposome comprises LIPOFECTAMINE™ 2000, LIPOFECTAMINE™ MESSENGERMAX™, LIPOFECTAMINE™ 3000, LIPOFECTAMINE™ RNAiMAX, LIPOFECTINE™, LIPOFECTAMINE™ LTX, LIPOFECTAMINE™ Stem Transfection Reagent, LIPOFECTAMINE™ CRISPRMAX™ Cas9 Transfection Reagent, VIAFECT™ TRANSTAST™, INVIVOFECTAMINE™ 3.0, MIRUS BIO™ TRANSIT™-2020, or GIBCO™ EXPIFECTAMINE™.

[0643] E75 comprises the AAV-ITR based gene delivery system of any one of embodiments E1 to E74, wherein the AAV-ITR vector is encapsulated in a liposome or lipid nanoparticle. E76 comprises the AAV-ITR based gene delivery system of any one of embodiments E1 to E75, wherein the Rep vector is encapsulated in a liposome or lipid nanoparticle. E77 comprises the AAV-ITR based gene delivery system of any one of embodiments E1 to E76, wherein the AAV-ITR vector is encapsulated in a first liposome and the Rep vector is encapsulated in a second liposome. E78 comprises the AAV-ITR based gene delivery system of any one of embodiments E1 to E74, wherein the AAV-ITR vector is encapsulated in a first LNP and the Rep vector is encapsulated in a second LNP. E79 comprises the AAV-ITR based gene delivery system of embodiment E77 or E78, wherein the first liposome or LNP and the second liposome or LNP have the same composition. E80 comprises the AAV-ITR based gene delivery system of embodiment E77 or E78, wherein the first liposome or LNP and the second liposome or LNP have different compositions.

[0644] E81 comprises the AAV-ITR based gene delivery system of any one of embodiments E1 to E80, wherein the AAV-ITR vector is encapsulated in a LNP and the Rep vector is encapsulated in a liposome. E82 comprises the AAV-ITR based gene delivery system any one of embodiments E1 to E80, wherein the AAV-ITR vector is encapsulated in a liposome and the Rep vector is encapsulated in a LNP. E83 comprises the AAV-ITR based gene delivery system of embodiment E81 or E82, wherein the liposome and LNP have the same composition. E84 comprises the AAV-ITR based gene delivery system of embodiment E81 or E82, wherein the liposome and LNP have different compositions. E85 comprises the AAV-ITR based gene delivery system of any one of embodiments E1 to E84, wherein the AAV-ITR vector and Rep vector are encapsulated in the same liposome or LNP. E86 comprises the AAV-ITR based gene delivery system of any one of embodiments E1 to E85, wherein the delivery system is targeted to bone marrow cells, hematopoietic stem cells (HSCs), hematopoietic stem and progenitor cells (HSPCs), peripheral blood mononuclear cells (PBMCs), myeloid progenitor cells, lymphoid progenitor cells, T-cells, B-cells, NKT cells, NK cells, dendritic cells, monocytes, granulocytes, erythrocytes, megakaryocytes, mast cells, basophils, eosinophils, neutrophils, macrophages, erythroid progenitor cells (e.g., HUDEP cells), megakaryocyte-erythroid progenitor cells (MEPs), common myeloid progenitor cells (CMPs), multipotent progenitor cells (MPPs), hematopoietic stem cells (HSCs), short term HSCs (ST-HSCs), IT-HSCs, long term HSCs (LT-HSCs), endothelial cells, neurons, astrocytes, pancreatic cells, pancreatic 3-islet cells, liver cells, muscle cells, skeletal muscle cells, cardiac muscle cells, hepatic cells, fat cells, intestinal cells, cells of the colon, or cells of the stomach.

[0645] E87 comprises the AAV-ITR based gene delivery system of embodiment E86, wherein the delivery system is targeted using a targeting molecule. E88 comprises the AAV-ITR based gene delivery system of embodiment E87, wherein the targeting molecule is an antibody. E89 comprises the AAV-ITR based gene delivery system of embodiment E88, wherein the antibody is an M-STAR antibody. E90 comprises the AAV-ITR based gene delivery system of embodiment E99, wherein the targeting molecule is covalently attached to a lipidic delivery system or polymeric delivery system co-encapsulating the AAV-ITR vector and Rep vector. E91 comprises a method of replicating a polynucleotide encoding a therapeutic polypeptide, therapeutic polynucleotide or combination thereof in vivo in a patient in need of treatment for a disease or condition, comprising co-delivering the AAV-ITR based gene delivery system of any one of embodiments E1 to E90 to the patient to transiently express the Rep protein encoded by the Rep vector to replicate and amplify the polynucleotide encoding the therapeutic polypeptide, therapeutic polynucleotide or combination encoded by the AAV-ITR vector.

[0646] E92 comprises a method of method of delivering a therapeutic polypeptide, therapeutic polynucleotide or combination thereof in vivo to a patient in need of treatment for a disease or condition, comprising co-delivering the AAV-ITR based gene delivery system of any one of embodiments E1 to E90 to the patient, wherein the Rep protein encoded by the Rep vector is expressed transiently and replicates and amplifies the polynucleotide encoding the therapeutic polypeptide, therapeutic polynucleotide or combination encoded by the AAV-ITR vector, and wherein the expression of the therapeutic polypeptide, therapeutic polynucleotide or combination thereof treats the disease or condition in the patient. E93 comprises a method the treat a disease or condition in a subject in need thereof, comprising co-delivering the AAV-ITR based gene delivery system of any one of embodiments E1 to E90 to the patient, wherein the Rep protein encoded by the Rep vector is expressed transiently and replicates and amplifies the polynucleotide encoding the therapeutic polypeptide, therapeutic polynucleotide or combination encoded by the AAV-ITR vector, and wherein the expression of the therapeutic polypeptide, therapeutic polynucleotide or combination thereof treats the disease or condition in the patient.

[0647] E94 comprises a therapeutic polypeptide, therapeutic polynucleotide or combination produced in vivo or ex vivo by co-delivering the AAV-ITR based gene delivery system of any one of embodiments E1 to E90 to a host cell, wherein the Rep protein encoded by the Rep vector is expressed transiently and replicates and amplifies the polynucleotide encoding the therapeutic polypeptide, therapeutic polynucleotide or combination encoded by the AAV-ITR vector, and wherein the cell expresses the therapeutic polypeptide, therapeutic polynucleotide or combination thereof. E95 comprises a set of vectors comprising (i) a linear dsDNA AAV-ITR vector comprising 5′ and 3′ AAV ITR flanking a polynucleotide sequence encoding a therapeutic polypeptide, a therapeutic polynucleotide, or a combination thereof, and, (ii) a linear mRNA Rep vector encoding a Rep protein. E96 comprises the set of vectors of embodiment E95, wherein the vectors are co-encapsulated in a lipidic or polymeric delivery system. E97 comprises the set of vectors of embodiment E96, wherein the lipidic or polymeric delivery system is targets to a specific cell or tissue. E98 comprises a host cell comprising (i) a linear dsDNA AAV-ITR vector comprising 5′ and 3′ AAV ITR flanking a polynucleotide sequence encoding a therapeutic polypeptide, a therapeutic polynucleotide, or a combination thereof, and, (ii) a linear mRNA Rep vector encoding a Rep protein. E99 comprises a pharmaceutical composition comprising the AAV-ITR based gene delivery system of any one of embodiments E1 to E90 and a pharmaceutically acceptable excipient. E100 comprises a pharmaceutical composition comprising the therapeutic polypeptide, therapeutic polynucleotide or combination thereof of embodiment E94, set of vectors of embodiments E95 to E97, or host cell of embodiment E98, and a pharmaceutically acceptable excipient. E101 comprises a lipid complex mixture suitable for co-encapsulation of an AAV-ITR vector and a Rep vector of any one of embodiments E95 to E97. E102 comprises a kit comprising (i) a linear dsDNA AAV-ITR vector comprising 5′ and 3′ AAV ITR flanking a polynucleotide sequence encoding a marker; and, (ii) a linear mRNA Rep vector encoding a Rep protein, and instructions to replace the marker with a polynucleotide encoding a therapeutic polypeptide, a therapeutic polynucleotide, or a combination thereof. E103 comprises a kit comprising (i) lipid complex mixture suitable for co-encapsulation of an AAV-ITR vector and a Rep vector; and (ii) instructions to co-encapsulate the vectors.

### Examples

### Materials and Methods

[0648] Cell Culture and In Vitro Assay. C2C12 cells were cultured in Dulbecco's Modified Eagle Medium (DMEM) supplemented with 10% fetal bovine serum (FBS) (Optima, Cat #512450H). C2C12 cell line was purchased from ATCC and used at passage under 20. Transfection was performed using Lipofectamine 2000 (Invitrogen, Cat #11668019) for AAV2 ITR-EGFP DNA and Lipofectamine MessengerMax (Invitrogen, Cat #LMRNA003) for Rep78 according to the User's manual.

[0649] Briefly, AAV2 ITR-EGFP linear DNA fragment was mixed with Lipofectamine 2000 reagent at 1:1 ratio in serum free medium. Rep78 mRNA was mixed with Lipofectamine MessengerMax reagent at 1:1 ratio in serum free medium. After 5 minutes incubation, complexed AAV ITR-EGFP and complexed Rep78 mRNA were mixed with different ratio, then added to C2C12 cells accordingly. DNA/mRNA lipid complexes were removed 24 hours post transfection and transfected cells were maintained as usual with regular split at confluence. EGFP expression was measured using flow cytometry and qPCR at indicated time points.

[0650] DNA, RNA Isolation and qPCR. Genomic DNA was isolated with the PureLink Genomic DNA kit (Invitrogen, Cat #K1820-00) according to the manufacturer's manual. Episomal DNA was isolated by using Hirt Supernatant DNA preparation protocol. Total RNA was isolated with the ReliaPrep™ RNA Miniprep Systems Kit (Promega, Cat #Z6011) according to the manufacturer's manual, followed by cDNA synthesis using Verso cDNA Synthesis Kit (Thermo Scientific, Cat #AB-1453). For qPCR, PowerUp Syber Green Master Mix (Applied Biosystems, Cat #A25742) was used according to the manufacturer's protocol. The PCR program used for amplification was 1) 95° C. for 10 min, 2) 95° C. for 10 s, 3) 60° C. for 30 s, 4) 72° C. for 30 s. Steps 2 to 4 were repeated for 40 cycles to amplify EGFP and GAPDH. The primers for EGFP were forward primer, 5′-cactacctgagcacccagtc-3′ (SEQ ID NO: 728), and reverse primer, 5′-tacagctcatccatgccgag-3′ (SEQ ID NO: 729). The primers for GAPDH were forward primer, 5′-ggagtcaacggatttggtcg-3′ (SEQ ID NO: 730), and reverse primer, 5′-gacggtgccatggaatttgc-3′ (SEQ ID NO: 731). One-way ANOVA was used to determine statistical significance in qPCR analysis. P<0.05 was considered as statistically significant

[0651] Western blot analysis. 100 ng of complexed AAV ITR-EGFP was added into each well of the 96-well-dish with indicated amount of Rep78 mRNA. The level of Rep78 protein was measured in AAV ITR-EGFP, AAV ITR-EGFP with Rep78 mRNA transfected C2C12 cells. whole-cell lysates were harvested by 2×SDS sample buffer. Proteins were separated in 7-12% SDS-polyacrylamide gel, transferred to a nitrocellulose membrane, probed with indicated antibodies, followed by detection with enhanced chemiluminescence and visualized by iBright.

[0652] Single Cell Sorting and Whole Genome Sequencing. Week 8 cultures from AAV ITR-EGFP lipid complexes alone transfected C2C12 cells and AAV ITR-EGFP with 3.5% of Rep78 mRNA lipid complexes mixture transfected C2C12 cells were chosen to performed single cell sorting. The samples were prepared for samples according to the recommended procedure (Sony, model LE-MA900BP). Briefly, the sorting chamber was wiped down with DI water. Following the directions of the Sony MA-900 software, a new 100 uM chip was placed, followed by startup and then autocalibration using the automatic setup beads. The 96 well plate sorting was calibrated to ensure droplets end up in the corresponding wells. The cells were washed with PBS, placed into a 15 mL tube, and loaded into the chamber. The cells were acquired and then gated on the main population by FSC-A vs BSC-A to gate out debris and then on EGFP positive cells. EGFP positive cells were sorted into one cell/well in a 96 well plate which contained pre-conditioned media. Sorted single cells were cultured in Dulbecco's Modified Eagle Medium (DMEM) supplemented with 10% fetal bovine serum (FBS) (Optima, Cat #S12450H). 3 individual clones from each group were chosen and performed whole genome sequencing. The whole genome sequencing was performed by Azenta (Burlington, MA). The genomic DNAs were prepared from frozen cell pellets and fragmented for sequencing. The FASTQ data sets from sequencing were aligned against Genome data base and annotated variants. In addition, EGFP sequence from the ITR-EGFP vector was aligned against the genome sequences. No EGFP sequences were found in any genomic DNA fragments.

### Example 1

Design of AAV ITR_GOI Vector DNA and Rep68/78 mRNA

[0653] A linear AAV-ITR vector (AAV ITR_GOI DNA) containing a left side AAV2 ITR/Rep78 binding site (Ori)/terminal resolution site (TRS), a CMV IE enhancer/promoter/intron (as splicing donor) and a HIV-1 R region (as splicing acceptor), a gene of interest (GOI) with a polylinker, a bovine growth hormone polyA (Tbgh), followed by a right AAV2 ITR was synthesized and cloned into a pUC57 vector. The AAV ITR_GOI DNA was propagated in E. coli SURE2 strain. The plasmid DNA sequence was confirmed by sequencing. For in vitro and in vivo experiments, the AAV ITR_GOI dsDNA plasmid was digested using PvuII.

[0654] In vitro transcribed (IVT) vectors expressing AAV2 Rep68 or Rep78 mRNAs were made by cloning the synthesized AAV2 Rep68 and Rep78 genes into the standard IVT plasmid using SwaI/SpeI restriction sites. Linearized IVT vector was used for in vitro transcription using standard procedure and mRNA generated was purified using the MEGAclear Transcription Clean-Up Kit. The purified mRNA then was aliquoted and stored at −80° C. for future use.

[0655] AAV replication is initiated by Rep68/78 protein (FIG. 1A). Replication assays confirmed that AAV ITR constructs can be replicated when providing Rep68/78 mRNA to dividing cells expressing Pol δ, RFC, PCNA, and MCM complex (FIG. 1B).

[0656] FIG. 2A shows an AAV-ITR linear DNA vector comprising a nucleic acid encoding a gene of interest and FIG. 2B shows a Rep78 IVT mRNA vector. The AAV-ITR linear DNA vector contains the following elements
[0657] (1) Left side AAV2 ITR/Rep78 binding site (Ori)/terminal resolution site (TRS);
[0658] (2) CMV IE enhancer/promoter/intron (as splicing donor) and HIV-1 R region (as splicing acceptor);
[0659] (3) Gene of Interest (GOI) with polylinker;
[0660] (4) Bovine growth hormone polyA (Tbgh),
[0661] (5) Right side AAV2 ITR.

[0662] The AAV-ITR linear DNA vector was synthesized and cloned into pUC57 vector, followed by propagation in E. coli SURE2 strain. Plasmid DNA sequence was further confirmed by sequencing. The dsDNA plasmid was digested using PvuII to releasing the AAV ITR dsDNA fragment containing the gene of interest for in vitro and in vivo experiments. IVT vectors for making AAV2 Rep68 or Rep78 mRNAs were made by cloning synthesized AAV2 Rep68 and Rep78 genes into the standard IVT plasmid using SwaI/SpeI. Linearized IVT vector was used for in vitro transcription using standard procedure and purified using the MEGAclear Transcription Clean-Up Kit. The purified mRNA then was aliquoted and stored at −80° C. for future use.

### Example 2

### Selection of in Vitro Delivering Vehicle: Liposome or LNPs

[0663] Current LNPs have not been shown to be good delivery vehicles for intramuscular (IM) administration due to their intrinsic EpoE binding properties and LDLR mediated entry into LDLR expressing cells. Muscle cells lack LDLR expression resulting in low entry delivered by LNPs. Antibody mediated targeting to muscle cells can be a viable approach but requires identification of muscle cell surface proteins as targets. Cationic lipid based liposomes and polymer-based nanoparticles have a long history for transfection of various cell lines in vitro with great efficiency. However, their application in vivo is hampered by toxicity and induction of immune responses against a transgene they carry due to the proinflammatory nature of the lipids and polymers. Furthermore, the presence of viral Rep proteins in cells can contribute to a proinflammatory response. Therefore, provided herein are approaches to limit proinflammatory responses induced by viral Rep proteins. In one approach, the time period during which Rep 68/78 protein is present in a target cell is limited by providing Rep 68/78 encoding nucleic acids as RNAs.

### Example 3

### In Vitro Transgene Expression

[0664] FIG. 3A is schematic diagram indicating how the AAV ITR-EGFP lipid complexes and Rep78 mRNA lipid complexes were formed and transfected to C2C12 cells with different ratios. 100 ng of complexed AAV ITR-EGFP was added into each well of the 96-well-dish with indicated amount of Rep78 mRNA.

[0665] EGFP expression was measured using flow cytometry at the indicated time points. Percentage of GFP+ cells was plotted both as percentage of GFP+ cells over time and medium fluorescent intensity (MFI) over time. ITR_EGFP dsDNA co-transfected with Rep78 mRNA results in sustained GFP protein expression in C2C12 mouse myoblast cells (FIG. 3B). ITR_EGFP dsDNA co-transfected with Rep78 mRNA resulted in sustained GFP protein expression in 3T3 embryonic fibroblasts cells (FIG. 4). 100 ng of complexed AAV ITR-EGFP was added into each well of the 96-well-dish with indicated amount of Rep78 mRNA. The level of Rep78 protein was measured in AAV ITR-EGFP, AAV ITR-EGFP with Rep78 mRNA transfected C2C12 cells. whole-cell lysates were harvested by 2×SDS sample buffer. Proteins were separated in 7-12% SDS-polyacrylamide gel, transferred to a nitrocellulose membrane, probed with indicated antibodies, followed by detection with enhanced chemiluminescence and visualized by iBright.

[0666] Quantitative analysis of EGFP mRNA level and ITR-EGFP DNA level from C2C12 cells co-transfected with ITR-EGFP dsDNA and Rep78 mRNA is shown in FIG. 5 and FIG. 6. C2C12 cells were co-transfected using AAV ITR-EGFP lipid complexes and Rep78 mRNA lipid complexes as previous described at different ratios. Total mRNA, genomic DNA and episomal fraction of DNA were prepared as described in the Material and Methods section. En FIG. 5, the level of EGFP RNA was measured using qPCR to detect EGFP mRNA as described in the Material and Methods section. In FIG. 6 genomic and episomal DNA fractions were also quantitated using qPCR to detect the EGFP gene.

[0667] Integration of ITR-EGFP DNA into the host cell genome was analyzed using whole genome sequencing (FIG. 7A and FIG. 7B). FIG. 7A shows AAV ITR-EGFP+lipid complexes and different ratios of Rep78 mRNA+lipid complexes co-transfected into C2C12 cells. EGFP positive cells were selected and single cell sorting was performed. Three individual clones from each group were chosen used to conduct whole genome sequencing.

[0668] FIG. 7B shows whole genome sequencing results indicating that in none of the individual clones the EGFP gene was located in the cell nucleus fraction. Thus, AAV ITR was not integrated into a chromosome.

[0669] In summary, AAV Rep78 expressed from mRNA had a short time of expression, which is important to avoid immune response when applied in vivo to an animal model or to a human subject. But transient expression of Rep78 induced significant level of linear ITR_GOI vector replication, helping establish 10-fold higher persistent transgene expression through episomal maintenance or increased chromosomal integration compared to linear ITR_GOI vector DNA alone. Higher persistent transgene expression resulted in higher total recombinant therapeutic protein expression in vitro. When different ratios of AAV ITR_GFP DNA to Rep78 RNA were used, highest transduction efficiencies were observed when ratios of Rep78 vector to AAV ITR_GFP DNA vector between 1.5% and 10% was present in DNA/RNA lipid preparations. Thus, co-delivery of AAV Rep78 mRNA with linear ITR_GOI vector can be a robust gene delivery system for expression of therapeutic protein in vivo through ex vivo or in vivo delivery.

### Example 4

### In Vivo Transgene Expression

[0670] In vivo delivery was performed using in vivo-jetPEI (Polyplus, Cat #101000040) for AAV2 ITR-luciferase DNA and in vivo-jetRNA (Polyplus, Cat #101000122) for Rep78 according to the User's manual. Briefly, AAV2 ITR-luciferase linear DNA fragment and in vivo-jetPEI reagent were diluted in 5% glucose separately, then mixed AAV2 ITR-luciferase linear DNA fragment and in vivo-jetPEI® reagent together at N/P ratio 8. Rep78 mRNA was mixed in vivo-jetRNA® reagent at 1:2 ratio in mRNA buffer. After 15 minutes incubation at RT, 3.5% of complexed Rep78 were mixed with complexed AAV ITR-luciferase and injected to 6-week-old BALB/c mice (Charles River) mice through intramuscular route (IM). 50 ul of DNA/(mRNA)/jetPEI complex containing 15 ug DNA was injected into each leg. Each mouse received total of 30 ug DNA with or w/o 3.5% (w/w) of Rep78 mRNA/jetPEI complex. See FIG. 8A. Following the IM injection of the test material, mice were imaged in the IVIS system in a timely dependent manner. Briefly, mice were administered D-luciferin at 150 mg/kg intraperitoneally and were imaged 10 minutes post-injection. All images were processed for total flux and each animal with whole body ROI. All animals and user protocols were conducted in compliance with CRL IACUC under IACUC No. 1035. See FIG. 8B.

[0671] Results indicated robust Luciferase expression when liposomes containing an AAV2-ITR vector comprising the luciferase gene were co-administered with liposomes containing a Rep78 vector comprising an mRNA encoding AAV2 Rep78. Thus, the in vivo data conformed that co-delivery of AAV Rep78 mRNA with linear a AAV-ITR vector encoding a GOI can be a robust gene delivery system for expression of therapeutic protein in vivo through ex vivo or in vivo delivery.

TABLE 11
Exemplary construct sequences.

| | Molecular design / Protein name | Polypeptide | Encoding |
|---|---|---|---|
| Construct | Description | Chains | Polynucleotides |
| MX1954 | STAR_ahCD19_hB43xahCD20_ofa_CD8BBZ | SEQ ID | SEQ ID |
| | See FIG. 9, structure B | NO: 1 | NO: 18 |
| | Construct encoding a bispecific aCD19/aCD20 | | |
| | CAR comprising a CD8-derived spacer and TM | | |
| | domain, and an IC domain comprising 4-1BB | | |
| | and CD3ζ. | | |
| MX1955 | STAR_ahCD19_hB43xahCD20_ofa_CD4TM_BBZ | SEQ ID | SEQ ID |
| | See FIG. 9, structure C | NO: 2 | NO: 19 |
| | Construct encoding a bispecific aCD19/aCD20 | | |
| | CAR comprising a CD4-derived spacer and TM | | |
| | domain, , and an IC domain comprising 4-1BB | | |
| | and CD3ζ. | | |
| MX1956 | STAR_ahCD19_hB43xahCD20_ofa(altL1)_CD8TM_BBZ | SEQ ID | SEQ ID |
| | | NO: 3 | NO: 20 |
| MX1957 | STAR_ahCD19_hB43xahCD20_ofa(altL2)_CD8TM_BBZ | SEQ ID | SEQ ID |
| | | NO: 4 | NO: 21 |
| MX1958 | EGFP | SEQ ID | SEQ ID |
| | Enhanced Green Fluorescent Protein (marker) | NO: 5 | NO: 22 |
| MX1959 | hEPO | SEQ ID | SEQ ID |
| | Human Erythropoietin | NO: 6 | NO: 23 |
| MX1560 | mCherry | SEQ ID | SEQ ID |
| | mCherry Red Fluorescente Protein (marker) | NO: 7 | NO: 24 |
| MX1561 | mEPO | SEQ ID | SEQ ID |
| | Human Erythropoietin | NO: 8 | NO: 25 |
| MX1962 | Rep78 | SEQ ID | SEQ ID |
| | AAV2 Rep78 protein (Genbank QDH44117.1) | NO: 9 | NO: 26 |
| | from Adeno-associated virus isolate | | |
| | CHC442_AAV.FL.linear isolate (Genbank | | |
| | MK139249.1) | | |
| MX717 | VRC01.23/PGDM1400XePGT121.18_DQ | SEQ ID | SEQ ID |
| | | NO: 10 | NO: 27 |
| | | SEQ ID | SEQ ID |
| | | NO: 11 | NO: 28 |
| | | SEQ ID | SEQ ID |
| | | NO: 12 | NO: 29 |
| | | SEQ ID | SEQ ID |
| | | NO: 13 | NO: 30 |
| MX718 | VRC01.23/PGDM1400XePGT121.18_LS | SEQ ID | SEQ ID |
| | | NO: 14 | NO: 31 |
| | | SEQ ID | SEQ ID |
| | | NO: 15 | NO: 32 |
| | | SEQ ID | SEQ ID |
| | | NO: 16 | NO: 33 |
| | | SEQ ID | SEQ ID |
| | | NO: 17 | NO: 34 |

### Example 5

### Identification of 5′ and 3′ ITR and Rep Sequences in Parvoviral Genomes

[0672] Identification of 5′ and 3′ ITR and Rep sequences in Parvoviral genomes can be conducted routinely by a person of ordinary skill in the art using publicly available tools and without undue experimentation as disclosed in detail in U.S. Provisional Application No. 63/552,575, filed on Feb. 12, 2024, which is herein incorporated by reference in its entirety. Namely, the ITRs are identified by pairwise alignment between the genomic sequence and its reverse complement, wherein the ITRs correspond to areas of approximately 10000 sequence complementarity. The reverse complement of the genomic sequence of the parvovorus can be generated using, for example, the Reverse Complement tool available at www.bioinformatics.org/sms/rev_comp.html. The alignment of the original genomic sequence and its reverse complement can be conducted using, for example, Clustal Omega, available at www.ebi. ac.uk/jdispatcher/msa/clustalo. The ITR sequences identified using this alignment method disclosed above can be used to identify the parvoviral ITRs corresponding to any of the parvirus genomes disclosed in the present application to generate the AAV-ITR vectors of the present disclosure.

[0673] To identify the sequence encoding the Rep78 protein in the same parvoviral genome in which the ITRs were identified as described above, the parvoviral genomic sequence can be translated to the corresponding amino acid sequence, e.g., using the Translate tool available at web.expasy.org/translate/. The identified protein sequence can be extracted in fasta format as disclosed in detail in U.S. Provisional Application No. 63/552,575, and used to map the amino acid sequence encoding the Rep protein onto the genomic sequence, yielding the Rep-encoding polynucleotide sequence that can be used to generate a Rep vector of the present disclosure.

[0674] In summary, 5′ ITR, 3′ ITR, and AAV-Rep78 ortholog sequences can be identified for each one of the parvovirus genomes disclosed in the present application and available in public databases by a person of skill in the art using the methods disclosed above without undue experimentation.

### INCORPORATION BY REFERENCE

[0675] The contents of all cited references (including literature references, patents, patent applications, and websites) that can be cited throughout this application are hereby expressly incorporated by reference in their entirety for any purpose, as are the references cited therein, in the versions publicly available on the date the present application was filed Protein and nucleic acid sequences identified by database accession number and other information contained in the subject database entries (e.g., non-sequence related content in database entries corresponding to specific Genbank accession numbers) are incorporated by reference, and correspond to the corresponding database release publicly available on the date the present application was filed.

### EQUIVALENTS

[0676] While various specific aspects have been illustrated and described, the above specification is not restrictive. It will be appreciated that various changes can be made without departing from the spirit and scope of the invention(s). Many variations will become apparent to those skilled in the art upon review of this specification.

[0677] It is to be appreciated that the Detailed Description section, and not the Summary and Abstract sections, is intended to be used to interpret the claims. The Summary and Abstract sections can set forth one or more but not all exemplary embodiments of the present invention as contemplated by the inventor(s), and thus, are not intended to limit the present invention and the appended claims in any way.

[0678] The present invention has been described above with the aid of functional building blocks illustrating the implementation of specified functions and relationships thereof. The boundaries of these functional building blocks have been arbitrarily defined herein for the convenience of the description. Alternate boundaries can be defined so long as the specified functions and relationships thereof are appropriately performed.

[0679] The foregoing description of the specific embodiments will so fully reveal the general nature of the invention that others can, by applying knowledge within the skill of the art, readily modify and/or adapt for various applications such specific embodiments, without undue experimentation, without departing from the general concept of the present invention. Therefore, such adaptations and modifications are intended to be within the meaning and range of equivalents of the disclosed embodiments, based on the teaching and guidance presented herein. It is to be understood that the phraseology or terminology herein is for the purpose of description and not of limitation, such that the terminology or phraseology of the present specification is to be interpreted by the skilled artisan in light of the teachings and guidance.

[0680] The breadth and scope of the present invention should not be limited by any of the above-described exemplary embodiments, but should be defined only in accordance with the following claims and their equivalents.

1. An AAV-ITR based gene delivery system comprising
(i) a linear double-stranded DNA (dsDNA) AAV-ITR vector comprising 5′ and 3′ AAV internal terminal repeats (ITR) flanking a polynucleotide sequence encoding a therapeutic polypeptide, a therapeutic polynucleotide, or a combination thereof (“AAV-ITR vector”); and,
(ii) a mRNA vector encoding a AAV Rep protein (“AAV Rep vector”),
wherein the AAV-ITR vector is encapsulated in a first liposome or lipid nanoparticle (LNP) and the Rep vector is encapsulated in a second liposome or LNP, and wherein the delivery system is targeted to a cell or tissue using at least one targeting molecule.

2. (canceled)

3. The AAV-ITR based gene delivery system of claim 1_, wherein the ITR comprises an ITR sequence from AAV1, AAV2, AAV3, AAV3B, AAV4, AAV5, AAV6, AAV7, AAV8, AAV9, AAV10, AAV 11, AAV12, AAV13, an ortholog parvoviral ITR, or a functional fragment of functional variant thereof.

4. (canceled)

5. The AAV-ITR based gene delivery system of claim 1, wherein the AAV Rep protein comprises a Rep78 protein, a Rep68 protein, a variant thereof, or a functional fragment thereof.

6. The AAV-ITR based gene delivery system of claim 3, wherein the AAV Rep78 protein is from AAV1, AAV2, AAV3, AAV3B, AAV4, AAV5, AAV6, AAV7, AAV8, AAV9, AAV10, AAV 11, AAV12, or AAV13, a variant thereof, or a functional fragment thereof.

7. The AAV-ITR based gene delivery system of claim 1, wherein the topology of the AAV-ITR vector corresponds to Schema I
[ITR_{L}]-[E]-[P]-[I]-[GOI]-[P(A) signal]-[ITR_{R}]
wherein:
ITR_{L} and ITR_{R} are ITRs, and ITR_{R} is the reverse complement if ITR_{L};
E is an enhancer;
P is a promoter;
I is an intron;
GOI is a polynucleotide sequence encoding a therapeutic polypeptide, a therapeutic polynucleotide, or a combination thereof, and,
P(A) signal is a polyadenylation signal.

8. The AAV-ITR based gene delivery system of claim 1, wherein the topology of the AAV Rep vector corresponds to Schema II
[P]-[5′ UTR]-[Rep78/68]-[3′ UTR]-[P(A) tail]
wherein:
P is a promoter;
5′ UTR is a 5′ untranslated region;
3′ UTR is a 3′ untranslated region;
Rep78/68 is a polynucleotide sequence encoding a Rep78 or Rep68 protein; and,
P(A) tail is a polyadenylation tail.

9. The AAV-ITR based gene delivery system of claim 1, wherein the polynucleotide sequence encodes an antibody, an enzyme, a receptor, an ion channel, a vaccine antigen, a chimeric antigen receptor (CAR), a hormone, a cytokine, a growth factor, or an apoptosis regulator.

10. The AAV-ITR based gene delivery system of claim 1, wherein the liposome and/or LNP comprise
(i) a cationic or ionizable lipid or lipidoid;
(ii) a structural lipid;
(iii) a helper lipid;
(iv) a stabilizing lipid; or,
(v) a combination thereof.

11. The AAV-ITR based gene delivery system of claim 10, wherein the ionizable lipid or lipidoid is selected from the group consisting of cKK-E12, AIC-0315, SM-102, YK-009, DLin-MC3-DMA (MC3), DLin-KC2-DMA (KC2), A6, OF-02, A18-Iso5-2DC18, 98N₁₂-5, 9A1p9, C12-200, 7C1, G0-C14, L319, 304O₁₃, OF-Deg-Lin, 306-O12B, 306O110, FTT5, Lipid 10, and combinations thereof.

12. (canceled)

13. The AAV-ITR based gene delivery system of claim 1, wherein the at least one targeting molecule is an antibody or a combination thereof.

14. The AAV-ITR based gene delivery system of claim 13, wherein the antibody is an M-STAR antibody or a combination thereof.

15. A method of replicating a polynucleotide encoding a therapeutic polypeptide, therapeutic polynucleotide or combination thereof in vivo in a patient in need of treatment for a disease or condition, comprising delivering the AAV-ITR based gene delivery system of claim 1 to the patient to transiently express the AAV Rep protein encoded by the AAV Rep vector to replicate and amplify the polynucleotide encoding the therapeutic polypeptide, therapeutic polynucleotide or combination encoded by the AAV-ITR vector.

16. A method of method of delivering a therapeutic polypeptide, therapeutic polynucleotide or combination thereof in vivo to a patient in need of treatment for a disease or condition, comprising delivering the AAV-ITR based gene delivery system of claim 1 to the patient, wherein the AAV Rep protein encoded by the AAV Rep vector is expressed transiently and replicates and amplifies the polynucleotide encoding the therapeutic polypeptide, therapeutic polynucleotide or combination encoded by the AAV-ITR vector, and wherein the expression of the therapeutic polypeptide, therapeutic polynucleotide or combination thereof treats the disease or condition in the patient.

17. A therapeutic polypeptide, therapeutic polynucleotide or combination produced in vivo or ex vivo by delivering the AAV-ITR based gene delivery system of claim 1 to a host cell, wherein the AAV Rep protein encoded by the AAV Rep vector is expressed transiently and replicates and amplifies the polynucleotide encoding the therapeutic polypeptide, therapeutic polynucleotide or combination encoded by the AAV-ITR vector, and wherein the cell expresses the therapeutic polypeptide, therapeutic polynucleotide or combination thereof.

18. (canceled)

19. A host cell comprising (i) a linear double-stranded DNA (dsDNA) AAV-ITR vector comprising 5′ and 3′ AAV internal terminal repeats (ITR) flanking a polynucleotide sequence encoding a therapeutic polypeptide, a therapeutic polynucleotide, or a combination thereof, and, (ii) a linear mRNA AVV Rep vector encoding an AAV Rep protein.

20. A kit comprising (i) a linear double-stranded DNA (dsDNA) AAV-ITR vector comprising 5′ and 3′ AAV internal terminal repeats (ITR) flanking a polynucleotide sequence encoding a marker; and, (ii) a linear mRNA AAV Rep vector encoding an AAV Rep protein, and instructions to replace the marker with a polynucleotide encoding a therapeutic polypeptide, a therapeutic polynucleotide, or a combination thereof.

21. The kit of claim 20, further comprising lipids to generate at least one liposome or LNP to encapsulate the AAV-ITR vector and the AAV Rep vector, and instructions to generate the at least one liposome or LNP.

22. The kit of claim 21, further comprising a targeting molecule and/or targeting reagents to conjugate the targeting molecule to at least one liposome or LNP, and instructions to conjugate the targeting molecule to at least one liposome or LNP.

23. The AAV-ITR based gene delivery system of claim 1, wherein the first and second liposome or LNP are the same liposome or LNP, and wherein the AAV-ITR vector and the AAV Rep vector are co-delivered in the same liposome or LNP.

24. The AAV-ITR based gene delivery system of claim 9, wherein the CAR is a bispecific anti-CD19/anti-CD20 CAR.

The application's sequence listing, which the Patent Office published only in electronic form, follows.

SEQUENCE LISTING (732 sequences)

SEQ ID NO: 1 - protein, 723 aa, synthetic construct
  source 1..723: note = STAR_ahCD19_hB43xahCD20_ofa_CD8BBZ - MX1954
DIQLTQSPSFLSASVGDRVTITCKASQSVDYSGDSYLNWYQQKPGKAPKLLIYDASNLVSGVPSRFSGSGSGTEFTLTISSLQPEDFATYYCQQSTENPWTFGGGTKLEIKGGSSGEIVLTQSPATLSLSPGERATLSCRASQSVSSYLAWYQQKPGQAPRLLIYDASNRATGIPARFSGSGSGTDFTLTISSLEPEDFAVYYCQQRSNWPITFGQGTRLEIKGGGGSGGSGSGGGGSASGSGEVQLVESGGGLVQPGRSLRLSCAASGFTFNDYAMHWVRQAPGKGLEWVSTISWNSGSIGYADSVKGRFTISRDNAKKSLYLQMNSLRAEDTALYYCAKDIQYGNYYYGMDVWGQGTTVTVSSGGSSGQVQLVQSGAEVKKPGSSVKVSCKASGYAFSSYWMNWVRQAPGQGLEWMGQIWPGDSDTNYAQKFQGRVTITADESTSTAYMELSSLRSEDTAVYYCARRETTTVGRYYYAMDYWGQGTTVTVSSASGGSGTTTPAPRPPTPAPTIASQPLSLRPEACRPAAGGAVHTRGLDFACDIYIWAPLAGTCGVLLLSLVITLYCKRGRKKLLYIFKQPFMRPVQTTQEEDGCSCRFPEEEEGGCELRVKFSRSADAPAYQQGQNQLYNELNLGRREEYDVLDKRRGRDPEMGGKPRRKNPQEGLYNELQKDKMAEAYSEIGMKGERRRGKGHDGLYQGLSTATKDTYDALHMQALPPR

SEQ ID NO: 2 - protein, 694 aa, synthetic construct
  source 1..694: note = STAR_ahCD19_hB43xahCD20_ofa_CD4TM_BBZ - MX1955
DIQLTQSPSFLSASVGDRVTITCKASQSVDYSGDSYLNWYQQKPGKAPKLLIYDASNLVSGVPSRFSGSGSGTEFTLTISSLQPEDFATYYCQQSTENPWTFGGGTKLEIKGGSSGEIVLTQSPATLSLSPGERATLSCRASQSVSSYLAWYQQKPGQAPRLLIYDASNRATGIPARFSGSGSGTDFTLTISSLEPEDFAVYYCQQRSNWPITFGQGTRLEIKGGGGSGGSGSGGGGSASGSGEVQLVESGGGLVQPGRSLRLSCAASGFTFNDYAMHWVRQAPGKGLEWVSTISWNSGSIGYADSVKGRFTISRDNAKKSLYLQMNSLRAEDTALYYCAKDIQYGNYYYGMDVWGQGTTVTVSSGGSSGQVQLVQSGAEVKKPGSSVKVSCKASGYAFSSYWMNWVRQAPGQGLEWMGQIWPGDSDTNYAQKFQGRVTITADESTSTAYMELSSLRSEDTAVYYCARRETTTVGRYYYAMDYWGQGTTVTVSSASGGSGESNIKVLPTWSTPVQPMALIVLGGVAGLLLFIGLGIFFCVKRGRKKLLYIFKQPFMRPVQTTQEEDGCSCRFPEEEEGGCELRVKFSRSADAPAYQQGQNQLYNELNLGRREEYDVLDKRRGRDPEMGGKPRRKNPQEGLYNELQKDKMAEAYSEIGMKGERRRGKGHDGLYQGLSTATKDTYDALHMQALPPR

SEQ ID NO: 3 - protein, 699 aa, synthetic construct
  source 1..699: note = STAR_ahCD19_hB43xahCD20_ofa(altL1)_CD8TM_BBZ - MX1956
DIQLTQSPSFLSASVGDRVTITCKASQSVDYSGDSYLNWYQQKPGKAPKLLIYDASNLVSGVPSRFSGSGSGTEFTLTISSLQPEDFATYYCQQSTENPWTFGGGTKLEIKGGSSGGSEIVLTQSPATLSLSPGERATLSCRASQSVSSYLAWYQQKPGQAPRLLIYDASNRATGIPARFSGSGSGTDFTLTISSLEPEDFAVYYCQQRSNWPITFGQGTRLEIKGGGGSGGSGSGGGGSASGSGEVQLVESGGGLVQPGRSLRLSCAASGFTFNDYAMHWVRQAPGKGLEWVSTISWNSGSIGYADSVKGRFTISRDNAKKSLYLQMNSLRAEDTALYYCAKDIQYGNYYYGMDVWGQGTTVTVSSGGSSGGSQVQLVQSGAEVKKPGSSVKVSCKASGYAFSSYWMNWVRQAPGQGLEWMGQIWPGDSDTNYAQKFQGRVTITADESTSTAYMELSSLRSEDTAVYYCARRETTTVGRYYYAMDYWGQGTTVTVSSASGGSGRPAAGGAVHTRGLDFASDIYIWAPLAGTCGVLLLSLVITLYKRGRKKLLYIFKQPFMRPVQTTQEEDGCSCRFPEEEEGGCELRVKFSRSADAPAYQQGQNQLYNELNLGRREEYDVLDKRRGRDPEMGGKPRRKNPQEGLYNELQKDKMAEAYSEIGMKGERRRGKGHDGLYQGLSTATKDTYDALHMQALPPR

SEQ ID NO: 4 - protein, 700 aa, synthetic construct
  source 1..700: note = STAR_ahCD19_hB43xahCD20_ofa(altL2)_CD8TM_BBZ - MX1957
DIQLTQSPSFLSASVGDRVTITCKASQSVDYSGDSYLNWYQQKPGKAPKLLIYDASNLVSGVPSRFSGSGSGTEFTLTISSLQPEDFATYYCQQSTENPWTFGGGTKLEIKGGSSGGGGGSEIVLTQSPATLSLSPGERATLSCRASQSVSSYLAWYQQKPGQAPRLLIYDASNRATGIPARFSGSGSGTDFTLTISSLEPEDFAVYYCQQRSNWPITFGQGTRLEIKGGSGSGGGGSASGSGEVQLVESGGGLVQPGRSLRLSCAASGFTFNDYAMHWVRQAPGKGLEWVSTISWNSGSIGYADSVKGRFTISRDNAKKSLYLQMNSLRAEDTALYYCAKDIQYGNYYYGMDVWGQGTTVTVSSGGSSGGGGGSQVQLVQSGAEVKKPGSSVKVSCKASGYAFSSYWMNWVRQAPGQGLEWMGQIWPGDSDTNYAQKFQGRVTITADESTSTAYMELSSLRSEDTAVYYCARRETTTVGRYYYAMDYWGQGTTVTVSSASGGSGRPAAGGAVHTRGLDFASDIYIWAPLAGTCGVLLLSLVITLYKRGRKKLLYIFKQPFMRPVQTTQEEDGCSCRFPEEEEGGCELRVKFSRSADAPAYQQGQNQLYNELNLGRREEYDVLDKRRGRDPEMGGKPRRKNPQEGLYNELQKDKMAEAYSEIGMKGERRRGKGHDGLYQGLSTATKDTYDALHMQALPPR

SEQ ID NO: 5 - protein, 239 aa, synthetic construct
  source 1..239: note = EGFP - MX1958
MVSKGEELFTGVVPILVELDGDVNGHKFSVSGEGEGDATYGKLTLKFICTTGKLPVPWPTLVTTLTYGVQCFSRYPDHMKQHDFFKSAMPEGYVQERTIFFKDDGNYKTRAEVKFEGDTLVNRIELKGIDFKEDGNILGHKLEYNYNSHNVYIMADKQKNGIKVNFKIRHNIEDGSVQLADHYQQNTPIGDGPVLLPDNHYLSTQSALSKDPNEKRDHMVLLEFVTAAGITLGMDELYK

SEQ ID NO: 6 - protein, 193 aa, synthetic construct
  source 1..193: note = hEPO - MX1959
MGVHECPAWLWLLLSLLSLPLGLPVLGAPPRLICDSRVLERYLLEAKEAENITTGCAEHCSLNENITVPDTKVNFYAWKRMEVGQQAVEVWQGLALLSEAVLRGQALLVNSSQPWEPLQLHVDKAVSGLRSLTTLLRALGAQKEAISPPDAASAAPLRTITADTFRKLFRVYSNFLRGKLKLYTGEACRTGDR

SEQ ID NO: 7 - protein, 239 aa, synthetic construct
  source 1..239: note = mCherry - MX1560
MVSKGEEDNMAIIKEFMRFKVHMEGSVNGHEFEIEGEGEGRPYEGTQTAKLKVTKGGPLPFAWDILSPQFMYGSKAYVKHPADIPDYLKLSFPEGFKWERVMNFEDGGVVTVTQDSSLQDGEFIYKVKLRGTNFPSDGPVMQKKTMGWEASSERMYPEDGALKGEIKQRLKLKDGGHYDAEVKTTYKAKKPVQLPGAYNVNIKLDITSHNEDYTIVEQYERAEGRHSTGGMDELYKSGN

SEQ ID NO: 8 - protein, 192 aa, synthetic construct
  source 1..192: note = mEPO - MX1561
MGVPERPTLLLLLSLLLIPLGLPVLCAPPRLICDSRVLERYILEAKEAENVTMGCAEGPRLSENITVPDTKVNFYAWKRMEVEEQAIEVWQGLSLLSEAILQAQALLANSSQPPETLQLHIDKAISGLRSLTSLLRVLGAQKELMSPPDTTPPAPLRTLTVDTFCKLFRVYANFLRGKLKLYTGEVCRRGDR

SEQ ID NO: 9 - protein, 621 aa, synthetic construct
  source 1..621: note = Rep78 - MX1962
MPGFYEIVIKVPSDLDEHLPGISDSFVHWVAEKEWELPPDSDMNLNLIEQAPLTVAEKLQRDFLTEWRRVSKAPEALFFVQFEKGESYFHMHVLVETTGVKSMVLGRFLSQIREKLIQRVYRGIEPTLPNWFAVTKTRNGAGGGNKVVDECYIPNYLLPKTQPELQWAWTNMEQYLSACLNLAERKRLVAQHLTHVSQTQEQNKENQNPNSDAPVIRSKTSARYMELVGWLVDKGITSEKQWIQEDQASYISFNAASNSRSQIKAALDNAGKIMSLTKTAPDYLVGQQPVEDISSNRIYKILELNGYDPQYAASVFLGWATKKFGKRNTIWLFGPATTGKTNIAEAIAHTVPFYGCVNWTNENFPFNDCVDKMVIWWEEGKMTAKVVESAKAILGGSKVRVDQKCKSSAQIDPTPVIVTSNTNMCAVIDGNSTTFEHQQPLQDRMFKFELTRRLDHDFGKVTKQEVKDFFRWAKDHVVEVEHEFYVKKGGAKKRPAPSDADISEPKRARESVAQPSTSDAEASINYADRYQNKCSRHVGMNLMLFPCRQCERMNQNSNICFTHGQKDCLECFPVSESQPVSVVKKAYQKLCYIHHIMGKVPDACSACDLVNVDLDDCISEQ

SEQ ID NO: 10 - protein, 612 aa, synthetic construct
  source 1..612: note = VRC01.23/PGDM1400XePGT121.18_DQ - MX717 Chain 1
QMQLQESGPGLVKPGETLSLTCSVSGASISSSYWSWLRETPGKGLEWIGYTHHSGDTNYAPSLKSRVHLGLHPSKNQVSLSLTSVTAADTAVYYCARTLHGRRIYGVVAFNEYYTYFYWPTWGKGTQVTVSSDKTHTQVHLTQSGPEVRKPGTSVKVSCKAPGNTLKTYDLHWVRSVPGQGLQWMGWISHEGDKKVIVERFKAKVTIDWDRSTNTAYLQLSGLTSGDTAVYYCAKGSKHRLRDYALYDDDGALNWAVDVDYLSNLEFWGQGTAVTVSSDKTHTASTKGPSVFPLAPSSKSTSGGTAALGCLVKDYFPEPVTVSWNSGALTSGVHTFPAVLQSSGLYSLSSVVTVPSSSLGTQTYICNVNHKPSNTKVDKKVEPKSCDKTHTCPPCPAPELLGGPSVFLFPPKPKDTLMISRDPEVTCVVVDVSHEDPEVKFNWYVDGVEVHNAKTKPREEQYNSTYRVVSVLQVLHQDWLNGKEYKCKVSNKALPAPIEKTISKAKGQPREPQVYTLPPCRDELTKNQVSLWCLVKGFYPSDIAVEWESNGQPENNYKTTPPVLDSDGSFFLYSKLTVDKSRWQQGNVFSCSVMHEALHNHYTQKSLSLSPG

SEQ ID NO: 11 - protein, 334 aa, synthetic construct
  source 1..334: note = VRC01.23/PGDM1400XePGT121.18_DQ - MX717 Chain 2
DFVLTQSPHSLSVTPGESASISCKSSHSLIHGDRNNYLAWYVQKPGRSPQLLIYLASSRASGVPDRFSGSGSDKDFTLKISRVETEDVGTYYCMQGRESPWTFGQGTKVDIKDKTHTSDISVAPGETVRITCGGESIGSRAVQWYQHRPGQAPRLIIYNNQDRPPGIPERFSGSPDIDFGTTATLTISNVEAGDEATYYCHIWDSRRPTNWELGPGTTLTVLDKTHTRTVAAPSVFIFPPSDEQLKSGTASVVCLLNNFYPREAKVQWKVDNALQSGNSQESVTEQDSKDSTYSLSSTLTLSKADYEKHKVYACEVTHQGLSSPVTKSFNRGEC

SEQ ID NO: 12 - protein, 457 aa, synthetic construct
  source 1..457: note = VRC01.23/PGDM1400XePGT121.18_DQ - MX717 Chain 3
QVQLVQSGGQMKKPGESMRISCRASGYEFIDCTLNWIRLAPGKRPEWMGWLKPRWGAVNYARPLQGRVTMTRQLSQDPDDPDWGTAFLELRSLTVDDTAVYFCTRGKNCDYNWDFEHWGRGTPVIVSSASTKGPSVFPLAPSSKSTSGGTAALGCLVKDYFPEPVTVSWNSGALTSGVHTFPAVLQSSGLYSLSSVVTVPSSSLGTQTYICNVNHKPSNTKVDKKVEPKSCDKTHTCPPCPAPELLGGPSVFLFPPKPKDTLMISRDPEVTCVVVDVSHEDPEVKFNWYVDGVEVHNAKTKPREEQYNSTYRVVSVLQVLHQDWLNGKEYKCKVSNKALPAPIEKTISKAKGQPREPQVCTLPPSRDELTKNQVSLSCAVKGFYPSDIAVEWESNGQPENNYKTTPPVLDSDGSFFLVSKLTVDKSRWQQGNVFSCSVMHEALHNHYTQKSLSLSPG

SEQ ID NO: 13 - protein, 207 aa, synthetic construct
  source 1..207: note = VRC01.23/PGDM1400XePGT121.18_DQ - MX717 Chain 4
LTQSPGTLSLSPGETAIISCRTSQYGSLAWYQQRPGQAPRLVIYSGSTRAAGIPDRFSGSRWGPDYNLTISNLESGDFGVYYCQQYEFFGQGTKVQVDIKRTVAAPSVFIFPPSDEQLKSGTASVVCLLNNFYPREAKVQWKVDNALQSGNSQESVTEQDSKDSTYSLSSTLTLSKADYEKHKVYACEVTHQGLSSPVTKSFNRGEC

SEQ ID NO: 14 - protein, 612 aa, synthetic construct
  source 1..612: note = VRC01.23/PGDM1400XePGT121.18_LS - MX718 Chain 1
QMQLQESGPGLVKPGETLSLTCSVSGASISSSYWSWLRETPGKGLEWIGYTHHSGDTNYAPSLKSRVHLGLHPSKNQVSLSLTSVTAADTAVYYCARTLHGRRIYGVVAFNEYYTYFYWPTWGKGTQVTVSSDKTHTQVHLTQSGPEVRKPGTSVKVSCKAPGNTLKTYDLHWVRSVPGQGLQWMGWISHEGDKKVIVERFKAKVTIDWDRSTNTAYLQLSGLTSGDTAVYYCAKGSKHRLRDYALYDDDGALNWAVDVDYLSNLEFWGQGTAVTVSSDKTHTASTKGPSVFPLAPSSKSTSGGTAALGCLVKDYFPEPVTVSWNSGALTSGVHTFPAVLQSSGLYSLSSVVTVPSSSLGTQTYICNVNHKPSNTKVDKKVEPKSCDKTHTCPPCPAPELLGGPSVFLFPPKPKDTLMISRTPEVTCVVVDVSHEDPEVKFNWYVDGVEVHNAKTKPREEQYNSTYRVVSVLTVLHQDWLNGKEYKCKVSNKALPAPIEKTISKAKGQPREPQVYTLPPCRDELTKNQVSLWCLVKGFYPSDIAVEWESNGQPENNYKTTPPVLDSDGSFFLYSKLTVDKSRWQQGNVFSCSVLHEALHSHYTQKSLSLSPG

SEQ ID NO: 15 - protein, 334 aa, synthetic construct; identical to SEQ ID NO: 11
  source 1..334: note = VRC01.23/PGDM1400XePGT121.18_LS - MX718 Chain 2

SEQ ID NO: 16 - protein, 457 aa, synthetic construct
  source 1..457: note = VRC01.23/PGDM1400XePGT121.18_LS - MX718 Chain 3
QVQLVQSGGQMKKPGESMRISCRASGYEFIDCTLNWIRLAPGKRPEWMGWLKPRWGAVNYARPLQGRVTMTRQLSQDPDDPDWGTAFLELRSLTVDDTAVYFCTRGKNCDYNWDFEHWGRGTPVIVSSASTKGPSVFPLAPSSKSTSGGTAALGCLVKDYFPEPVTVSWNSGALTSGVHTFPAVLQSSGLYSLSSVVTVPSSSLGTQTYICNVNHKPSNTKVDKKVEPKSCDKTHTCPPCPAPELLGGPSVFLFPPKPKDTLMISRTPEVTCVVVDVSHEDPEVKFNWYVDGVEVHNAKTKPREEQYNSTYRVVSVLTVLHQDWLNGKEYKCKVSNKALPAPIEKTISKAKGQPREPQVCTLPPSRDELTKNQVSLSCAVKGFYPSDIAVEWESNGQPENNYKTTPPVLDSDGSFFLVSKLTVDKSRWQQGNVFSCSVLHEALHSHYTQKSLSLSPG

SEQ ID NO: 17 - protein, 207 aa, synthetic construct; identical to SEQ ID NO: 13
  source 1..207: note = VRC01.23/PGDM1400XePGT121.18_LS - MX718 Chain 4

SEQ ID NO: 18 - DNA, 5177 bp, synthetic construct
  source 1..5177: mol_type = other DNA; note = STAR_ahCD19_hB43xahCD20_ofa_CD8BBZ - MX1954
cctgcgttatcccctgattctgtggataaccgtattaccgcctttgagtgagctgataccgctcgccgcagccgaacgaccgagcgcagcgagtcagtgagcgaggaagcggaagagcgcccaatacgcaaaccgcctctccccgcgcgttggccgattcattaatgcagctggcacgacaggtttcccgactggaaagcgggcagtgagcgcaacgcaattaatgtgagttagctcactcattaggcaccccaggctttacactttatgcttccggctcgtatgttgtgtggaattgtgagcggataacaatttcacacaggaaacagctatgaccatgattacgaattgtaatacgactcactataagcataaaagtctcaacacaacatatacaaaacaaacgaatctcaagcaatcaagcattctacttctattgcagcaatttaaatcatttcttttaaagcaaaagcaattttctgaaaattttcaccatttacgaacgatagcgccatggggtggtcctgcatcattttgtttctcgtggccacagcgaccggtgtgcattccgacatacagctgactcagtctccaagctttctgagtgcgtcagtgggcgacagagtgaccatcacgtgtaaagcgagtcagagtgtggattacagcggcgacagctacctgaactggtatcaacagaagcccgggaaagccccgaaactgttgatctatgacgcctccaatctggtgtccggtgtacccagtcggttttcaggcagcggaagtggcaccgagttcaccttaaccatttctagtctccagcctgaggactttgctacctattattgccagcagagtacagagaacccctggacatttggtgggggaacaaaactggaaatcaagggggggtcctctggagagattgttctgactcagtcgcccgccacactgtcactttccccaggcgaacgcgcgacactcagctgtcgtgcctcacaaagcgtctcctcgtacttagcctggtatcagcagaagcctggacaggctccccggttgctgatctacgatgccagcaatcgcgccactggtatccccgccaggttctcgggctccgggagcggcaccgattttactctgactatatcaagcctagaaccagaggacttcgcggtgtattattgccaacagagaagtaactggcccatcacgtttgggcagggcacgaggttggaaatcaagggaggcggaggatcagggggatcgggaagtgggggcggtggatctgcttctggctcgggcgaggtgcagctggttgaatctggcggaggactggtccaaccggggcgtagtctccggctgtcttgtgcagccagcgggtttaccttcaacgactatgccatgcactgggtccgacaggccccaggcaaaggacttgaatgggtgtccaccatctcctggaattcaggctctatcggctacgccgattccgtgaaaggcaggttcaccatctccagagacaacgcgaaaaagtccctgtaccttcagatgaacagccttagggccgaggacactgccctctactactgcgccaaggacatacagtacggcaattactactacgggatggacgtgtgggggcagggtacaacagtgacagtctcatcaggagggagttcagggcaggttcagctggtgcaatccggtgcagaagttaagaaacctggtagcagcgtgaaggtgtcctgcaaggcctccggttatgccttctcaagctactggatgaactgggtccgacaggcacctggacaagggttggaatggatgggccaaatttggccaggcgacagcgatactaattatgcacagaagttccaggggagagtgactatcaccgcagacgagtctacaagcaccgcgtatatggaacttagttcattgaggagcgaggacactgcagtgtattactgtgcaaggcgggaaaccaccactgtaggcagatattattacgctatggactactggggccaggggaccacagtaacagtctcctccgctagcggcgggtccggaacaacaacgcctgctccacgcccgcctacgccagctccaacaattgccagtcaaccactgagcctgaggccggaagcttgtcgacctgctgctggtggagcagtgcatacaagaggactggatttcgcctgcgatatttacatttgggctcccctggctggcacgtgtggcgttctgttacttagcctggtcattactctttattgcaagcggggtagaaaaaagctcctgtacatcttcaagcaacccttcatgcggcccgtacagaccacccaggaggaagatggttgttcctgccgattccccgaggaggaagaaggcggttgcgagctgcgcgtcaagttcagccgctccgcagatgctcctgcctatcagcagggacagaatcagttatataacgagctcaatctcgggcgcagagaagagtacgatgtccttgacaagcggcgtggcagggatccggagatgggcgggaagccccgccggaagaatcctcaagagggcctctataatgagctgcagaaggacaagatggccgaggcctactcagagatcggaatgaagggcgagcgcaggagaggcaagggacacgatggactatatcaggggctcagcaccgctaccaaagatacctatgatgccctccacatgcaggctttacctcctcggtagtgaactagtagtgactgactaggatctggttaccactaaaccagcctcaagaacacccgaatggagtctctaagctacataataccaacttacacttacaaaatgttgtcccccaaaatgtagccattcgtatctgctcctaataaaaagaaagtttcttcacattctaaaaaaaaaaaaaaaaaaaaaaaaaaaaaaaaaaaaaaaaaaaaaaaaaaaaaaaaaaaaaaaaaaaaaaaaaaaaaaaaaaaaaaaaaaaaaaaaaaaaacttaagcggccgcgaattcgaattcgagctcggtacccggggatcctctagagtcgacctgcaggcatgcaagcttggcactggccgtcgttttacaacgtcgtgactgggaaaaccctggcgttacccaacttaatcgccttgcagcacatccccctttcgccagctggcgtaatagcgaagaggcccgcaccgatcgcccttcccaacagttgcgcagcctgaatggcgaatgcgatttattcaacaaagccgccgtcccgtcaagtcagcgtaatgctctgccagtgttacaaccaattaaccaattctgattagaaaaactcatcgagcatcaaatgaaactgcaatttattcatatcaggattatcaataccatatttttgaaaaagccgtttctgtaatgaaggagaaaactcaccgaggcagttccataggatggcaagatcctggtatcggtctgcgattccgactcgtccaacatcaatacaacctattaatttcccctcgtcaaaaataaggttatcaagtgagaaatcaccatgagtgacgactgaatccggtgagaatggcaaaagcttatgcatttctttccagacttgttcaacaggccagccattacgctcgtcatcaaaatcactcgcatcaaccaaaccgttattcattcgtgattgcgcctgagcgagacgaaatacgcgatcgctgttaaaaggacaattacaaacaggaatcgaatgcaaccggcgcaggaacactgccagcgcatcaacaatattttcacctgaatcaggatattcttctaatacctggaatgctgttttcccggggatcgcagtggtgagtaaccatgcatcatcaggagtacggataaaatgcttgatggtcggaagaggcataaattccgtcagccagtttagtctgaccatctcatctgtaacatcattggcaacgctacctttgccatgtttcagaaacaactctggcgcatcgggcttcccatacaatcgatagattgtcgcacctgattgcccgacattatcgcgagcccatttatacccatataaatcagcatccatgttggaatttaatcgcggcttcgagcaagacgtttcccgttgaatatggctcataacaccccttgtattactgtttatgtaagcagacagttttattgttcatgatgatatatttttatcttgtgcaatgtaacatcagagattttgagacacaacgtggctttgttgaataaatcgaacttttgctgagttgaaggatcagatcacgcatcttcccgacaacgcagaccgttccgtggcaaagcaaaagttcaaaatcaccaactggtccacctacaacaaagctctcatcaaccgtggctccctcactttctggctggatgatggggcgattcaggcctggtatgagtcagcaacaccttcttcacgaggcagacctctcgacggatcgttccactgagcgtcagaccccgtagaaaagatcaaaggatcttcttgagatcctttttttctgcgcgtaatctgctgcttgcaaacaaaaaaaccaccgctaccagcggtggtttgtttgccggatcaagagctaccaactctttttccgaaggtaactggcttcagcagagcgcagataccaaatactgtccttctagtgtagccgtagttaggccaccacttcaagaactctgtagcaccgcctacatacctcgctctgctaatcctgttaccagtggctgctgccagtggcgataagtcgtgtcttaccgggttggactcaagacgatagttaccggataaggcgcagcggtcgggctgaacggggggttcgtgcacacagcccagcttggagcgaacgacctacaccgaactgagatacctacagcgtgagcattgagaaagcgccacgcttcccgaagggagaaaggcggacaggtatccggtaagcggcagggtcggaacaggagagcgcacgagggagcttccagggggaaacgcctggtatctttatagtcctgtcgggtttcgccacctctgacttgagcgtcgatttttgtgatgctcgtcaggggggcggagcctatggaaaaacgccagcaacgcggcctttttacggttcctggccttttgctggccttttgctcacatgttcttt

SEQ ID NO: 19 - DNA, 5746 bp, synthetic construct
  source 1..5746: mol_type = other DNA; note = STAR_ahCD19_hB43xahCD20_ofa_CD4TM_BBZ - MX1955
tcgcgcgtttcggtgatgacggtgaaaacctctgacacatgcagctcccggagacggtcacagcttgtctgtaagcggatgccgggagcagacaagcccgtcagggcgcgtcagcgggtgttggcgggtgtcggggctggcttaactatgcggcatcagagcagattgtactgagagtgcaccatatgcggtgtgaaataccgcacagatgcgtaaggagaaaataccgcatcagattggctattggccattgcatacgttgtatccatatcataatatgtacatttatattggctcatgtccaacattaccgccatgttgacattgattattgactagtgtaatacgactcactataagcataaaagtctcaacacaacatatacaaaacaaacgaatctcaagcaatcaagcattctacttctattgcagcaatttaaatcatttcttttaaagcaaaagcaattttctgaaaattttcaccatttacgaacgatagctctagacaccatgaatagaggggtgccatttagacacttgctgctcgtcctgcagctcgccctcctaccagccgccacacagggggatatacaattaactcaaagtccctcctttctttcagcctcagtgggtgacagagtaacaattacgtgcaaagcatcacagtctgtcgactatagcggcgacagctatctgaattggtatcagcagaaacccggaaaggccccaaagctcctgatttatgacgcatcgaatctcgtgtccggtgtaccttccagattctccggatcagggtcaggaaccgagttcacccttacaatcagctcccttcagcctgaggattttgcaacctactactgtcaacagagcaccgagaacccttggacgttcggtggcggcacaaaactggaaatcaaggggggctcttctggcgagattgttctcacccagagtccagctacactttccctaagtccgggcgagcgggcgacccttagttgccgagcctcccagagcgtgtcttcctacctggcttggtatcagcagaagcccggacaggccccgaggctgcttatatacgatgcgtcaaaccgcgcaaccggcatcccagcccgattcagtggcagtggaagcgggaccgactttacgctgacaatctcctctttagaaccggaagattttgcggtctattactgccagcaaagatccaactggcccatcactttcggtcaggggactagattggaaatcaaggggggaggcggttccggcggttcaggaagtggcggaggcggttcagcctccggctcaggtgaagtgcagttggtcgagtctggggggggactggtccagccgggccgaagtttaaggctctcttgcgcagccagcggcttcaccttcaacgactacgcgatgcactgggtgcggcaggctcctggaaaagggctggagtgggtgagcacaatctcctggaactctggaagcattggttacgctgattccgttaaggggcggtttactatttctagggacaacgccaagaagtccctatatctacaaatgaatagcctgcgcgctgaagataccgcattgtactattgcgcaaaagacatccagtacggcaattactattacggcatggacgtctggggccagggcacaacggtgaccgtctcatctggggggagcagtggccaagtgcagctggtgcagtccggcgccgaagtcaaaaaacctggcagtagcgtgaaggtgagttgtaaagccagcgggtacgccttctcctcatactggatgaattgggtcagacaggctcccgggcaaggtttggagtggatgggtcagatatggccaggagatagcgatacaaactatgcccaaaagtttcaggggcgcgtgactataactgccgacgagagcactagcacagcttacatggaactgtctagcctgcgtagcgaggacacggctgtgtactactgcgctcgccgagagaccacaaccgttggccgttactactatgccatggattattggggccagggaactaccgttactgtgtcttcggcatcgggaggttcgggcgaaagcaacatcaaagtgctgcctacctggtcaactcccgttcaaccaatggctctcatcgtgctgggaggggtggcgggactcctgctcttcattggattgggcatttttttctgtgtaaaacggggacgcaagaagttgttatacatcttcaagcagccctttatgaggcccgtacagactacccaggaggaggatggatgttcttgtcggtttccagaggaggaggaaggcgggtgcgaactccgtgttaagttcagtcgcagcgccgacgcccctgcttatcagcagggacaaaatcagctgtacaacgagctgaatttaggccggcgcgaagagtatgacgtactggacaagaggagaggacgggaccccgaaatgggaggcaaacccaggaggaagaaccctcaggagggtctctataatgagctgcaaaaagataaaatggctgaagcatactctgaaattggtatgaaaggcgagcggaggcgaggaaagggacatgatgggctgtaccaaggactttccacagctaccaaggacacatatgatgcactgcacatgcaggcgctcccacctaggtgataggatccagtgactgactaggatctggttaccactaaaccagcctcaagaacacccgaatggagtctctaagctacataataccaacttacacttacaaaatgttgtcccccaaaatgtagccattcgtatctgctcctaataaaaagaaagtttcttcacattctaaaaaaaaaaaaaaaaaaaaaaaaaaaaaaaaaaaaaaaaaaaaaaaaaaaaaaaaaaaaaaaaaaaaaaaaaaaaaaaaaaaaaaaaaaaaaaaaaaaaacttaagcggccgcgaattcggtacccaggtgctgaagaattgacccggttcctcctgggccagaaagaagcaggcacatccccttctctgtgacacaccctgtccacgcccctggttcttagttccagccccactcataggacactcatagctcaggagggctccgccttcaatcccacccgctaaagtacttggagcggtctctccctccctcatcagcccaccaaaccaaacctagcctccaagagtgggaagaaattaaagcaagataggctattaagtgcagagggagagaaaatgcctccaacatgtgaggaagtaatgagagaaatcatagaattttaaggccatgatttaaggccatcatggccttaatcttccgcttcctcgctcactgactcgctgcgctcggtcgttcggctgcggcgagcggtatcagctcactcaaaggcggtaatacggttatccacagaatcaggggataacgcaggaaagaacatgtgagcaaaaggccagcaaaaggccaggaaccgtaaaaaggccgcgttgctggcgtttttccataggctccgcccccctgacgagcatcacaaaaatcgacgctcaagtcagaggtggcgaaacccgacaggactataaagataccaggcgtttccccctggaagctccctcgtgcgctctcctgttccgaccctgccgcttaccggatacctgtccgcctttctcccttcgggaagcgtggcgctttctcatagctcacgctgtaggtatctcagttcggtgtaggtcgttcgctccaagctgggctgtgtgcacgaaccccccgttcagcccgaccgctgcgccttatccggtaactatcgtcttgagtccaacccggtaagacacgacttatcgccactggcagcagccactggtaacaggattagcagagcgaggtatgtaggcggtgctacagagttcttgaagtggtggcctaactacggctacactagaagaacagtatttggtatctgcgctctgctgaagccagttaccttcggaaaaagagttggtagctcttgatccggcaaacaaaccaccgctggtagcggtggtttttttgtttgcaagcagcagattacgcgcagaaaaaaaggatctcaagaagatcctttgatcttttctacggggtctgacgctcagtggaacgaaaactcacgttaagggattttggtcatgagattatcaaaaaggatcttcacctagatccttttaaattaaaaatgaagttttaaatcaatctaaagtatatatgagtaaacttggtctgacagttaccaatgcttaatcagtgaggcacctatctcagcgatctgtctatttcgttcatccatagttgcctgactcggggggggggggcgctgaggtctgcctcgtgaagaaggtgttgctgactcataccaggcctgaatcgccccatcatccagccagaaagtgagggagccacggttgatgagagctttgttgtaggtggaccagttggtgattttgaacttttgctttgccacggaacggtctgcgttgtcgggaagatgcgtgatctgatccttcaactcagcaaaagttcgatttattcaacaaagccgccgtcccgtcaagtcagcgtaatgctctgccagtgttacaaccaattaaccaattctgattagaaaaactcatcgagcatcaaatgaaactgcaatttattcatatcaggattatcaataccatatttttgaaaaagccgtttctgtaatgaaggagaaaactcaccgaggcagttccataggatggcaagatcctggtatcggtctgcgattccgactcgtccaacatcaatacaacctattaatttcccctcgtcaaaaataaggttatcaagtgagaaatcaccatgagtgacgactgaatccggtgagaatggcaaaagcttatgcatttctttccagacttgttcaacaggccagccattacgctcgtcatcaaaatcactcgcatcaaccaaaccgttattcattcgtgattgcgcctgagcgagacgaaatacgcgatcgctgttaaaaggacaattacaaacaggaatcgaatgcaaccggcgcaggaacactgccagcgcatcaacaatattttcacctgaatcaggatattcttctaatacctggaatgctgttttcccggggatcgcagtggtgagtaaccatgcatcatcaggagtacggataaaatgcttgatggtcggaagaggcataaattccgtcagccagtttagtctgaccatctcatctgtaacatcattggcaacgctacctttgccatgtttcagaaacaactctggcgcatcgggcttcccatacaatcgatagattgtcgcacctgattgcccgacattatcgcgagcccatttatacccatataaatcagcatccatgttggaatttaatcgcggcctcgagcaagacgtttcccgttgaatatggctcataacaccccttgtattactgtttatgtaagcagacagttttattgttcatgatgatatatttttatcttgtgcaatgtaacatcagagattttgagacacaacgtggctttccccccccccccattattgaagcatttatcagggttattgtctcatgagcggatacatatttgaatgtatttagaaaaataaacaaataggggttccgcgcacatttccccgaaaagtgccacctgacgtctaagaaaccattattatcatgacattaacctataaaaataggcgtatcacgaggccctttcgtc

SEQ ID NO: 20 - DNA, 5749 bp, synthetic construct
  source 1..5749: mol_type = other DNA; note = STAR_ahCD19_hB43xahCD20_ofa(altL1)_CD8TM_BBZ - MX1956
tcgcgcgtttcggtgatgacggtgaaaacctctgacacatgcagctcccggagacggtcacagcttgtctgtaagcggatgccgggagcagacaagcccgtcagggcgcgtcagcgggtgttggcgggtgtcggggctggcttaactatgcggcatcagagcagattgtactgagagtgcaccatatgcggtgtgaaataccgcacagatgcgtaaggagaaaataccgcatcagattggctattggccattgcatacgttgtatccatatcataatatgtacatttatattggctcatgtccaacattaccgccatgttgacattgattattgactagtgtaatacgactcactataagcataaaagtctcaacacaacatatacaaaacaaacgaatctcaagcaatcaagcattctacttctattgcagcaatttaaatcatttcttttaaagcaaaagcaattttctgaaaattttcaccatttacgaacgatagctctagacaccatggctctgccagtgacggcgctgttgctgcctcttgcgctactgttacacgccgccaggccagatatacaactgacccagtctccttccttcctgtccgccagtgttggcgaccgtgtgactattacctgtaaagcaagccagagtgttgattactcaggcgactcatatttaaactggtaccagcaaaagcccggcaaggctcctaagctgctgatttacgacgcgagtaacctcgtatcgggggtcccttctaggtttagtggttccggaagtggcaccgaatttacgctaaccatcagctctcttcagcccgaagattttgcgacttattactgtcaacagtcgacagaaaacccttggacattcgggggggggacaaaattggagataaaaggcgggtccagcgggggatcggaaattgtgcttacccagagtcccgctactctgtccctctcaccaggcgagagggcgaccttgagctgtagagcttctcagtctgtcagcagttacctcgcttggtatcagcagaagccaggacaggccccccggctgctgatctacgacgcctcaaatagggccactggcattccggcaagattctccggttccggcagtggtacagactttaccctaacaattagttccctggagcctgaggacttcgcggtttattactgccagcagcggagcaactggccgatcactttcggccaggggaccagactcgaaattaaggggggagggggatctggaggctctgggagcggcggcgggggctcagcctctgggtccggagaggtacagttggtggagtccggtggtggtcttgtccagcccgggagaagccttcgcctctcctgtgccgcatccggatttaccttcaatgactacgctatgcactgggtacgccaggcacctggcaagggcctggaatgggtctctactatctcgtggaatagcggcagcattgggtacgcagattcagtgaagggtcgtttcacaatatctcgcgataacgccaaaaaatctctctatctccagatgaatagcctccgagcagaagatactgctttgtactactgcgccaaagatattcagtacggaaactactattacggcatggacgtttggggacagggtactactgtgaccgtgtctagcggaggatcaagcgggggcagccaagtgcaactggtccagagcggagccgaggttaagaagccagggagctccgtgaaggtcagctgcaaagctagcggctacgccttctcatcctactggatgaactgggtccggcaggccccgggccagggcctcgagtggatgggacaaatctggcccggcgacagtgataccaattatgcccaaaagttccagggaagagtgactatcacggctgacgagagcacttcaacagcatacatggagttaagttccttaaggagcgaggacaccgcagtgtattactgtgccaggcgggagacaaccacagttggaagatactactatgccatggattattgggggcagggtacgaccgtgactgtgtccagcgcaagtggtggatctggccgacccgctgctggaggagccgtccatacccgagggctggattttgcctcagacatctacatctgggcacccctcgccggcacatgcggcgtcctgctgttgtctcttgtgataacactgtacaagcggggtcgcaagaaactcctctatatcttcaagcagccctttatgcggccagtgcaaaccacacaagaggaagatggttgctcatgccgctttccagaggaagaggaaggtgggtgcgagcttagagtgaaattctctcgatccgctgatgcacctgcttaccagcagggccagaatcagctatataatgagttgaacctgggcagacgcgaagaatatgacgtactggacaaaaggagagggagggacccagagatggggggaaaaccccggcgtaagaacccacaagagggcctgtacaatgaattacaaaaggacaaaatggctgaagcatattcagagatcggcatgaagggggaaaggcgacggggaaagggtcacgatggactgtatcaaggcctgtccacagccaccaaagacacgtatgatgcccttcatatgcaggccctgccgcctcgctgataggatccagtgactgactaggatctggttaccactaaaccagcctcaagaacacccgaatggagtctctaagctacataataccaacttacacttacaaaatgttgtcccccaaaatgtagccattcgtatctgctcctaataaaaagaaagtttcttcacattctaaaaaaaaaaaaaaaaaaaaaaaaaaaaaaaaaaaaaaaaaaaaaaaaaaaaaaaaaaaaaaaaaaaaaaaaaaaaaaaaaaaaaaaaaaaaaaaaaaaaacttaagcggccgcgaattcggtacccaggtgctgaagaattgacccggttcctcctgggccagaaagaagcaggcacatccccttctctgtgacacaccctgtccacgcccctggttcttagttccagccccactcataggacactcatagctcaggagggctccgccttcaatcccacccgctaaagtacttggagcggtctctccctccctcatcagcccaccaaaccaaacctagcctccaagagtgggaagaaattaaagcaagataggctattaagtgcagagggagagaaaatgcctccaacatgtgaggaagtaatgagagaaatcatagaattttaaggccatgatttaaggccatcatggccttaatcttccgcttcctcgctcactgactcgctgcgctcggtcgttcggctgcggcgagcggtatcagctcactcaaaggcggtaatacggttatccacagaatcaggggataacgcaggaaagaacatgtgagcaaaaggccagcaaaaggccaggaaccgtaaaaaggccgcgttgctggcgtttttccataggctccgcccccctgacgagcatcacaaaaatcgacgctcaagtcagaggtggcgaaacccgacaggactataaagataccaggcgtttccccctggaagctccctcgtgcgctctcctgttccgaccctgccgcttaccggatacctgtccgcctttctcccttcgggaagcgtggcgctttctcatagctcacgctgtaggtatctcagttcggtgtaggtcgttcgctccaagctgggctgtgtgcacgaaccccccgttcagcccgaccgctgcgccttatccggtaactatcgtcttgagtccaacccggtaagacacgacttatcgccactggcagcagccactggtaacaggattagcagagcgaggtatgtaggcggtgctacagagttcttgaagtggtggcctaactacggctacactagaagaacagtatttggtatctgcgctctgctgaagccagttaccttcggaaaaagagttggtagctcttgatccggcaaacaaaccaccgctggtagcggtggtttttttgtttgcaagcagcagattacgcgcagaaaaaaaggatctcaagaagatcctttgatcttttctacggggtctgacgctcagtggaacgaaaactcacgttaagggattttggtcatgagattatcaaaaaggatcttcacctagatccttttaaattaaaaatgaagttttaaatcaatctaaagtatatatgagtaaacttggtctgacagttaccaatgcttaatcagtgaggcacctatctcagcgatctgtctatttcgttcatccatagttgcctgactcggggggggggggcgctgaggtctgcctcgtgaagaaggtgttgctgactcataccaggcctgaatcgccccatcatccagccagaaagtgagggagccacggttgatgagagctttgttgtaggtggaccagttggtgattttgaacttttgctttgccacggaacggtctgcgttgtcgggaagatgcgtgatctgatccttcaactcagcaaaagttcgatttattcaacaaagccgccgtcccgtcaagtcagcgtaatgctctgccagtgttacaaccaattaaccaattctgattagaaaaactcatcgagcatcaaatgaaactgcaatttattcatatcaggattatcaataccatatttttgaaaaagccgtttctgtaatgaaggagaaaactcaccgaggcagttccataggatggcaagatcctggtatcggtctgcgattccgactcgtccaacatcaatacaacctattaatttcccctcgtcaaaaataaggttatcaagtgagaaatcaccatgagtgacgactgaatccggtgagaatggcaaaagcttatgcatttctttccagacttgttcaacaggccagccattacgctcgtcatcaaaatcactcgcatcaaccaaaccgttattcattcgtgattgcgcctgagcgagacgaaatacgcgatcgctgttaaaaggacaattacaaacaggaatcgaatgcaaccggcgcaggaacactgccagcgcatcaacaatattttcacctgaatcaggatattcttctaatacctggaatgctgttttcccggggatcgcagtggtgagtaaccatgcatcatcaggagtacggataaaatgcttgatggtcggaagaggcataaattccgtcagccagtttagtctgaccatctcatctgtaacatcattggcaacgctacctttgccatgtttcagaaacaactctggcgcatcgggcttcccatacaatcgatagattgtcgcacctgattgcccgacattatcgcgagcccatttatacccatataaatcagcatccatgttggaatttaatcgcggcctcgagcaagacgtttcccgttgaatatggctcataacaccccttgtattactgtttatgtaagcagacagttttattgttcatgatgatatatttttatcttgtgcaatgtaacatcagagattttgagacacaacgtggctttccccccccccccattattgaagcatttatcagggttattgtctcatgagcggatacatatttgaatgtatttagaaaaataaacaaataggggttccgcgcacatttccccgaaaagtgccacctgacgtctaagaaaccattattatcatgacattaacctataaaaataggcgtatcacgaggccctttcgtc

SEQ ID NO: 21 - DNA, 5752 bp, synthetic construct
  source 1..5752: mol_type = other DNA; note = STAR_ahCD19_hB43xahCD20_ofa(altL2)_CD8TM_BBZ - MX1957
tcgcgcgtttcggtgatgacggtgaaaacctctgacacatgcagctcccggagacggtcacagcttgtctgtaagcggatgccgggagcagacaagcccgtcagggcgcgtcagcgggtgttggcgggtgtcggggctggcttaactatgcggcatcagagcagattgtactgagagtgcaccatatgcggtgtgaaataccgcacagatgcgtaaggagaaaataccgcatcagattggctattggccattgcatacgttgtatccatatcataatatgtacatttatattggctcatgtccaacattaccgccatgttgacattgattattgactagtgtaatacgactcactataagcataaaagtctcaacacaacatatacaaaacaaacgaatctcaagcaatcaagcattctacttctattgcagcaatttaaatcatttcttttaaagcaaaagcaattttctgaaaattttcaccatttacgaacgatagctctagacaccatggctctgccagtgacggcgctgttgctgcctcttgcgctactgttacacgccgccaggccagatatacaactgacccagtctccttccttcctgtccgccagtgttggcgaccgtgtgactattacctgtaaagcaagccagagtgttgattactcaggcgactcatatttaaactggtaccagcaaaagcccggcaaggctcctaagctgctgatttacgacgcgagtaacctcgtatcgggggtcccttctaggtttagtggttccggaagtggcaccgaatttacgctaaccatcagctctcttcagcccgaagattttgcgacttattactgtcaacagtcgacagaaaacccttggacattcgggggggggacaaaattggagataaaaggcggttcctcaggaggtggaggcgggtcggaaattgtgcttacccagagtcccgctactctgtccctctcaccaggcgagagggcgaccttgagctgtagagcttctcagtctgtcagcagttacctcgcttggtatcagcagaagccaggacaggccccccggctgctgatctacgacgcctcaaatagggccactggcattccggcaagattctccggttccggcagtggtacagactttaccctaacaattagttccctggagcctgaggacttcgcggtttattactgccagcagcggagcaactggccgatcactttcggccaggggaccagactcgaaattaaggggggaagcgggagtggcggtgggggtagcgcaagtggaagtggtgaggtacagttggtggagtccggtggtggtcttgtccagcccgggagaagccttcgcctctcctgtgccgcatccggatttaccttcaatgactacgctatgcactgggtacgccaggcacctggcaagggcctggaatgggtctctactatctcgtggaatagcggcagcattgggtacgcagattcagtgaagggtcgtttcacaatatctcgcgataacgccaaaaaatctctctatctccagatgaatagcctccgagcagaagatactgctttgtactactgcgccaaagatattcagtacggaaactactattacggcatggacgtttggggacagggtactactgtgaccgtgtctagcggcggctccagcggaggcggcggcgggtcccaagtgcaactggtccagagcggagccgaggttaagaagccagggagctccgtgaaggtcagctgcaaagctagcggctacgccttctcatcctactggatgaactgggtccggcaggccccgggccagggcctcgagtggatgggacaaatctggcccggcgacagtgataccaattatgcccaaaagttccagggaagagtgactatcacggctgacgagagcacttcaacagcatacatggagttaagttccttaaggagcgaggacaccgcagtgtattactgtgccaggcgggagacaaccacagttggaagatactactatgccatggattattgggggcagggtacgaccgtgactgtgtccagcgcaagtggtggatctggccgacccgctgctggaggagccgtccatacccgagggctggattttgcctcagacatctacatctgggcacccctcgccggcacatgcggcgtcctgctgttgtctcttgtgataacactgtacaagcggggtcgcaagaaactcctctatatcttcaagcagccctttatgcggccagtgcaaaccacacaagaggaagatggttgctcatgccgctttccagaggaagaggaaggtgggtgcgagcttagagtgaaattctctcgatccgctgatgcacctgcttaccagcagggccagaatcagctatataatgagttgaacctgggcagacgcgaagaatatgacgtactggacaaaaggagagggagggacccagagatggggggaaaaccccggcgtaagaacccacaagagggcctgtacaatgaattacaaaaggacaaaatggctgaagcatattcagagatcggcatgaagggggaaaggcgacggggaaagggtcacgatggactgtatcaaggcctgtccacagccaccaaagacacgtatgatgcccttcatatgcaggccctgccgcctcgctgataggatccagtgactgactaggatctggttaccactaaaccagcctcaagaacacccgaatggagtctctaagctacataataccaacttacacttacaaaatgttgtcccccaaaatgtagccattcgtatctgctcctaataaaaagaaagtttcttcacattctaaaaaaaaaaaaaaaaaaaaaaaaaaaaaaaaaaaaaaaaaaaaaaaaaaaaaaaaaaaaaaaaaaaaaaaaaaaaaaaaaaaaaaaaaaaaaaaaaaaaacttaagcggccgcgaattcggtacccaggtgctgaagaattgacccggttcctcctgggccagaaagaagcaggcacatccccttctctgtgacacaccctgtccacgcccctggttcttagttccagccccactcataggacactcatagctcaggagggctccgccttcaatcccacccgctaaagtacttggagcggtctctccctccctcatcagcccaccaaaccaaacctagcctccaagagtgggaagaaattaaagcaagataggctattaagtgcagagggagagaaaatgcctccaacatgtgaggaagtaatgagagaaatcatagaattttaaggccatgatttaaggccatcatggccttaatcttccgcttcctcgctcactgactcgctgcgctcggtcgttcggctgcggcgagcggtatcagctcactcaaaggcggtaatacggttatccacagaatcaggggataacgcaggaaagaacatgtgagcaaaaggccagcaaaaggccaggaaccgtaaaaaggccgcgttgctggcgtttttccataggctccgcccccctgacgagcatcacaaaaatcgacgctcaagtcagaggtggcgaaacccgacaggactataaagataccaggcgtttccccctggaagctccctcgtgcgctctcctgttccgaccctgccgcttaccggatacctgtccgcctttctcccttcgggaagcgtggcgctttctcatagctcacgctgtaggtatctcagttcggtgtaggtcgttcgctccaagctgggctgtgtgcacgaaccccccgttcagcccgaccgctgcgccttatccggtaactatcgtcttgagtccaacccggtaagacacgacttatcgccactggcagcagccactggtaacaggattagcagagcgaggtatgtaggcggtgctacagagttcttgaagtggtggcctaactacggctacactagaagaacagtatttggtatctgcgctctgctgaagccagttaccttcggaaaaagagttggtagctcttgatccggcaaacaaaccaccgctggtagcggtggtttttttgtttgcaagcagcagattacgcgcagaaaaaaaggatctcaagaagatcctttgatcttttctacggggtctgacgctcagtggaacgaaaactcacgttaagggattttggtcatgagattatcaaaaaggatcttcacctagatccttttaaattaaaaatgaagttttaaatcaatctaaagtatatatgagtaaacttggtctgacagttaccaatgcttaatcagtgaggcacctatctcagcgatctgtctatttcgttcatccatagttgcctgactcggggggggggggcgctgaggtctgcctcgtgaagaaggtgttgctgactcataccaggcctgaatcgccccatcatccagccagaaagtgagggagccacggttgatgagagctttgttgtaggtggaccagttggtgattttgaacttttgctttgccacggaacggtctgcgttgtcgggaagatgcgtgatctgatccttcaactcagcaaaagttcgatttattcaacaaagccgccgtcccgtcaagtcagcgtaatgctctgccagtgttacaaccaattaaccaattctgattagaaaaactcatcgagcatcaaatgaaactgcaatttattcatatcaggattatcaataccatatttttgaaaaagccgtttctgtaatgaaggagaaaactcaccgaggcagttccataggatggcaagatcctggtatcggtctgcgattccgactcgtccaacatcaatacaacctattaatttcccctcgtcaaaaataaggttatcaagtgagaaatcaccatgagtgacgactgaatccggtgagaatggcaaaagcttatgcatttctttccagacttgttcaacaggccagccattacgctcgtcatcaaaatcactcgcatcaaccaaaccgttattcattcgtgattgcgcctgagcgagacgaaatacgcgatcgctgttaaaaggacaattacaaacaggaatcgaatgcaaccggcgcaggaacactgccagcgcatcaacaatattttcacctgaatcaggatattcttctaatacctggaatgctgttttcccggggatcgcagtggtgagtaaccatgcatcatcaggagtacggataaaatgcttgatggtcggaagaggcataaattccgtcagccagtttagtctgaccatctcatctgtaacatcattggcaacgctacctttgccatgtttcagaaacaactctggcgcatcgggcttcccatacaatcgatagattgtcgcacctgattgcccgacattatcgcgagcccatttatacccatataaatcagcatccatgttggaatttaatcgcggcctcgagcaagacgtttcccgttgaatatggctcataacaccccttgtattactgtttatgtaagcagacagttttattgttcatgatgatatatttttatcttgtgcaatgtaacatcagagattttgagacacaacgtggctttccccccccccccattattgaagcatttatcagggttattgtctcatgagcggatacatatttgaatgtatttagaaaaataaacaaataggggttccgcgcacatttccccgaaaagtgccacctgacgtctaagaaaccattattatcatgacattaacctataaaaataggcgtatcacgaggccctttcgtc

SEQ ID NO: 22 - DNA, 3662 bp, synthetic construct
  source 1..3662: mol_type = other DNA; note = EGFP - MX1958
tctttcctgcgttatcccctgattctgtggataaccgtattaccgcctttgagtgagctgataccgctcgccgcagccgaacgaccgagcgcagcgagtcagtgagcgaggaagcggaagagcgcccaatacgcaaaccgcctctccccgcgcgttggccgattcattaatgcagctggcacgacaggtttcccgactggaaagcgggcagtgagcgcaacgcaattaatgtgagttagctcactcattaggcaccccaggctttacactttatgcttccggctcgtatgttgtgtggaattgtgagcggataacaatttcacacaggaaacagctatgaccatgattacgaattgtaatacgactcactataagcataaaagtctcaacacaacatatacaaaacaaacgaatctcaagcaatcaagcattctacttctattgcagcaatttaaatcatttcttttaaagcaaaagcaattttctgaaaattttcaccatttacgaacgatagcgccatggtgtctaaaggggaggagttgttcactggtgtggtcccgatactagtggagttagacggcgacgtgaatggacacaagttttcagtttcgggcgagggggaaggtgatgccacttacggaaaactcactctgaagttcatttgcacgacaggaaagctcccagtcccttggccaacgcttgtgaccaccctaacctatggggtgcaatgtttttccaggtaccccgatcacatgaagcaacacgattttttcaaaagcgctatgcccgaaggttatgtccaggaacgaaccatcttctttaaggacgacggaaattataagacacgggcagaggtaaaattcgaaggggacactctggtcaatagaatcgagctgaaagggatcgattttaaggaggatggaaacatacttggccacaagctggaatacaattataatagtcacaacgtgtatattatggcagacaaacagaaaaacggcatcaaggttaatttcaaaattcgccataacatcgaagatggatcagtccagctggccgaccattaccagcagaacaccccaattggggacggccctgttctgctgcccgacaaccattacctgtccacacagagcgccctcagcaaagatcctaacgagaagagggatcatatggtgcttctcgaattcgtaacagcggctggcatcaccctgggcatggacgagttgtacaagactagtagtgactgactaggatctggttaccactaaaccagcctcaagaacacccgaatggagtctctaagctacataataccaacttacacttacaaaatgttgtcccccaaaatgtagccattcgtatctgctcctaataaaaagaaagtttcttcacattctaaaaaaaaaaaaaaaaaaaaaaaaaaaaaaaaaaaaaaaaaaaaaaaaaaaaaaaaaaaaaaaaaaaaaaaaaaaaaaaaaaaaaaaaaaaaaaaaaaaaacttaagcggccgcgaattcgaattcgagctcggtacccggggatcctctagagtcgacctgcaggcatgcaagcttggcactggccgtcgttttacaacgtcgtgactgggaaaaccctggcgttacccaacttaatcgccttgcagcacatccccctttcgccagctggcgtaatagcgaagaggcccgcaccgatcgcccttcccaacagttgcgcagcctgaatggcgaatgcgatttattcaacaaagccgccgtcccgtcaagtcagcgtaatgctctgccagtgttacaaccaattaaccaattctgattagaaaaactcatcgagcatcaaatgaaactgcaatttattcatatcaggattatcaataccatatttttgaaaaagccgtttctgtaatgaaggagaaaactcaccgaggcagttccataggatggcaagatcctggtatcggtctgcgattccgactcgtccaacatcaatacaacctattaatttcccctcgtcaaaaataaggttatcaagtgagaaatcaccatgagtgacgactgaatccggtgagaatggcaaaagcttatgcatttctttccagacttgttcaacaggccagccattacgctcgtcatcaaaatcactcgcatcaaccaaaccgttattcattcgtgattgcgcctgagcgagacgaaatacgcgatcgctgttaaaaggacaattacaaacaggaatcgaatgcaaccggcgcaggaacactgccagcgcatcaacaatattttcacctgaatcaggatattcttctaatacctggaatgctgttttcccggggatcgcagtggtgagtaaccatgcatcatcaggagtacggataaaatgcttgatggtcggaagaggcataaattccgtcagccagtttagtctgaccatctcatctgtaacatcattggcaacgctacctttgccatgtttcagaaacaactctggcgcatcgggcttcccatacaatcgatagattgtcgcacctgattgcccgacattatcgcgagcccatttatacccatataaatcagcatccatgttggaatttaatcgcggcttcgagcaagacgtttcccgttgaatatggctcataacaccccttgtattactgtttatgtaagcagacagttttattgttcatgatgatatatttttatcttgtgcaatgtaacatcagagattttgagacacaacgtggctttgttgaataaatcgaacttttgctgagttgaaggatcagatcacgcatcttcccgacaacgcagaccgttccgtggcaaagcaaaagttcaaaatcaccaactggtccacctacaacaaagctctcatcaaccgtggctccctcactttctggctggatgatggggcgattcaggcctggtatgagtcagcaacaccttcttcacgaggcagacctctcgacggatcgttccactgagcgtcagaccccgtagaaaagatcaaaggatcttcttgagatcctttttttctgcgcgtaatctgctgcttgcaaacaaaaaaaccaccgctaccagcggtggtttgtttgccggatcaagagctaccaactctttttccgaaggtaactggcttcagcagagcgcagataccaaatactgtccttctagtgtagccgtagttaggccaccacttcaagaactctgtagcaccgcctacatacctcgctctgctaatcctgttaccagtggctgctgccagtggcgataagtcgtgtcttaccgggttggactcaagacgatagttaccggataaggcgcagcggtcgggctgaacggggggttcgtgcacacagcccagcttggagcgaacgacctacaccgaactgagatacctacagcgtgagcattgagaaagcgccacgcttcccgaagggagaaaggcggacaggtatccggtaagcggcagggtcggaacaggagagcgcacgagggagcttccagggggaaacgcctggtatctttatagtcctgtcgggtttcgccacctctgacttgagcgtcgatttttgtgatgctcgtcaggggggcggagcctatggaaaaacgccagcaacgcggcctttttacggttcctggccttttgctggccttttgctcacatgt

SEQ ID NO: 23 - DNA, 3527 bp, synthetic construct
  source 1..3527: mol_type = other DNA; note = hEPO - MX1959
tctttcctgcgttatcccctgattctgtggataaccgtattaccgcctttgagtgagctgataccgctcgccgcagccgaacgaccgagcgcagcgagtcagtgagcgaggaagcggaagagcgcccaatacgcaaaccgcctctccccgcgcgttggccgattcattaatgcagctggcacgacaggtttcccgactggaaagcgggcagtgagcgcaacgcaattaatgtgagttagctcactcattaggcaccccaggctttacactttatgcttccggctcgtatgttgtgtggaattgtgagcggataacaatttcacacaggaaacagctatgaccatgattacgaattgtaatacgactcactataagcataaaagtctcaacacaacatatacaaaacaaacgaatctcaagcaatcaagcattctacttctattgcagcaatttaaatcatttcttttaaagcaaaagcaattttctgaaaattttcaccatttacgaacgatagcgccatgggtgttcacgaatgccccgcatggctgtggcttctgttgagcctcctcagcctgcctcttggactgccggtcctcggcgccccccctagattaatctgtgactcaagggtgctcgagcggtatttgcttgaggccaaggaggcagagaatataacaaccgggtgcgcagaacattgtagcctgaatgagaacattaccgttcccgacactaaagtgaatttttacgcctggaaaagaatggaagtggggcagcaagctgtggaggtctggcaaggcttggctctactcagtgaggccgtgctgcgcggacaggctctgctggtcaactcctcccagccatgggaaccactacagcttcacgtagataaggccgtgagtgggctgcgatccctgactacgctgttacgcgctctaggagcgcagaaggaagctatctcacctccagatgccgcaagcgccgcgcccctccggacaatcaccgcagatacttttaggaagctcttccgggtatattcgaacttcctgagaggcaaactgaagttgtacacaggtgaggcctgccgtaccggcgacaggtgaactagtagtgactgactaggatctggttaccactaaaccagcctcaagaacacccgaatggagtctctaagctacataataccaacttacacttacaaaatgttgtcccccaaaatgtagccattcgtatctgctcctaataaaaagaaagtttcttcacattctaaaaaaaaaaaaaaaaaaaaaaaaaaaaaaaaaaaaaaaaaaaaaaaaaaaaaaaaaaaaaaaaaaaaaaaaaaaaaaaaaaaaaaaaaaaaaaaaaaaaacttaagcggccgcgaattcgaattcgagctcggtacccggggatcctctagagtcgacctgcaggcatgcaagcttggcactggccgtcgttttacaacgtcgtgactgggaaaaccctggcgttacccaacttaatcgccttgcagcacatccccctttcgccagctggcgtaatagcgaagaggcccgcaccgatcgcccttcccaacagttgcgcagcctgaatggcgaatgcgatttattcaacaaagccgccgtcccgtcaagtcagcgtaatgctctgccagtgttacaaccaattaaccaattctgattagaaaaactcatcgagcatcaaatgaaactgcaatttattcatatcaggattatcaataccatatttttgaaaaagccgtttctgtaatgaaggagaaaactcaccgaggcagttccataggatggcaagatcctggtatcggtctgcgattccgactcgtccaacatcaatacaacctattaatttcccctcgtcaaaaataaggttatcaagtgagaaatcaccatgagtgacgactgaatccggtgagaatggcaaaagcttatgcatttctttccagacttgttcaacaggccagccattacgctcgtcatcaaaatcactcgcatcaaccaaaccgttattcattcgtgattgcgcctgagcgagacgaaatacgcgatcgctgttaaaaggacaattacaaacaggaatcgaatgcaaccggcgcaggaacactgccagcgcatcaacaatattttcacctgaatcaggatattcttctaatacctggaatgctgttttcccggggatcgcagtggtgagtaaccatgcatcatcaggagtacggataaaatgcttgatggtcggaagaggcataaattccgtcagccagtttagtctgaccatctcatctgtaacatcattggcaacgctacctttgccatgtttcagaaacaactctggcgcatcgggcttcccatacaatcgatagattgtcgcacctgattgcccgacattatcgcgagcccatttatacccatataaatcagcatccatgttggaatttaatcgcggcttcgagcaagacgtttcccgttgaatatggctcataacaccccttgtattactgtttatgtaagcagacagttttattgttcatgatgatatatttttatcttgtgcaatgtaacatcagagattttgagacacaacgtggctttgttgaataaatcgaacttttgctgagttgaaggatcagatcacgcatcttcccgacaacgcagaccgttccgtggcaaagcaaaagttcaaaatcaccaactggtccacctacaacaaagctctcatcaaccgtggctccctcactttctggctggatgatggggcgattcaggcctggtatgagtcagcaacaccttcttcacgaggcagacctctcgacggatcgttccactgagcgtcagaccccgtagaaaagatcaaaggatcttcttgagatcctttttttctgcgcgtaatctgctgcttgcaaacaaaaaaaccaccgctaccagcggtggtttgtttgccggatcaagagctaccaactctttttccgaaggtaactggcttcagcagagcgcagataccaaatactgtccttctagtgtagccgtagttaggccaccacttcaagaactctgtagcaccgcctacatacctcgctctgctaatcctgttaccagtggctgctgccagtggcgataagtcgtgtcttaccgggttggactcaagacgatagttaccggataaggcgcagcggtcgggctgaacggggggttcgtgcacacagcccagcttggagcgaacgacctacaccgaactgagatacctacagcgtgagcattgagaaagcgccacgcttcccgaagggagaaaggcggacaggtatccggtaagcggcagggtcggaacaggagagcgcacgagggagcttccagggggaaacgcctggtatctttatagtcctgtcgggtttcgccacctctgacttgagcgtcgatttttgtgatgctcgtcaggggggcggagcctatggaaaaacgccagcaacgcggcctttttacggttcctggccttttgctggccttttgctcacatgt

SEQ ID NO: 24 - DNA, 3665 bp, synthetic construct
  source 1..3665: mol_type = other DNA; note = mCherry - MX1560
tctttcctgcgttatcccctgattctgtggataaccgtattaccgcctttgagtgagctgataccgctcgccgcagccgaacgaccgagcgcagcgagtcagtgagcgaggaagcggaagagcgcccaatacgcaaaccgcctctccccgcgcgttggccgattcattaatgcagctggcacgacaggtttcccgactggaaagcgggcagtgagcgcaacgcaattaatgtgagttagctcactcattaggcaccccaggctttacactttatgcttccggctcgtatgttgtgtggaattgtgagcggataacaatttcacacaggaaacagctatgaccatgattacgaattgtaatacgactcactataagcataaaagtctcaacacaacatatacaaaacaaacgaatctcaagcaatcaagcattctacttctattgcagcaatttaaatcatttcttttaaagcaaaagcaattttctgaaaattttcaccatttacgaacgatagcgccatggtatccaaaggcgaagaggacaatatggctatcatcaaagagtttatgcggttcaaggtgcacatggagggatcagtaaatgggcacgagtttgaaattgaaggagagggagaaggccgaccttacgagggaacgcagacagccaagctgaaagtgacaaagggcgggccactcccattcgcctgggatatattaagcccccagttcatgtatgggtccaaggcgtacgtgaagcatccagctgatatccccgattatttgaaactgagctttccggagggcttcaaatgggaaagagtcatgaattttgaagacgggggtgttgtcactgtcacacaggatagcagcctccaagacggcgaattcatatataaggtgaagctgagagggactaacttccccagtgacgggcctgttatgcaaaaaaagacaatgggctgggaggctagtagcgagcgcatgtatcccgaagacggcgccctaaaaggggaaattaagcagaggctgaagcttaaagacggtggacactacgatgccgaggtgaagactacctacaaggcaaaaaagcctgtgcagctgccaggtgcatataacgtcaacatcaagctcgatatcacctcacataatgaggactacaccattgtggagcagtacgagagggcagagggccggcactcgaccggaggaatggacgaactgtacaaatccggcaactgaactagtagtgactgactaggatctggttaccactaaaccagcctcaagaacacccgaatggagtctctaagctacataataccaacttacacttacaaaatgttgtcccccaaaatgtagccattcgtatctgctcctaataaaaagaaagtttcttcacattctaaaaaaaaaaaaaaaaaaaaaaaaaaaaaaaaaaaaaaaaaaaaaaaaaaaaaaaaaaaaaaaaaaaaaaaaaaaaaaaaaaaaaaaaaaaaaaaaaaaaacttaagcggccgcgaattcgaattcgagctcggtacccggggatcctctagagtcgacctgcaggcatgcaagcttggcactggccgtcgttttacaacgtcgtgactgggaaaaccctggcgttacccaacttaatcgccttgcagcacatccccctttcgccagctggcgtaatagcgaagaggcccgcaccgatcgcccttcccaacagttgcgcagcctgaatggcgaatgcgatttattcaacaaagccgccgtcccgtcaagtcagcgtaatgctctgccagtgttacaaccaattaaccaattctgattagaaaaactcatcgagcatcaaatgaaactgcaatttattcatatcaggattatcaataccatatttttgaaaaagccgtttctgtaatgaaggagaaaactcaccgaggcagttccataggatggcaagatcctggtatcggtctgcgattccgactcgtccaacatcaatacaacctattaatttcccctcgtcaaaaataaggttatcaagtgagaaatcaccatgagtgacgactgaatccggtgagaatggcaaaagcttatgcatttctttccagacttgttcaacaggccagccattacgctcgtcatcaaaatcactcgcatcaaccaaaccgttattcattcgtgattgcgcctgagcgagacgaaatacgcgatcgctgttaaaaggacaattacaaacaggaatcgaatgcaaccggcgcaggaacactgccagcgcatcaacaatattttcacctgaatcaggatattcttctaatacctggaatgctgttttcccggggatcgcagtggtgagtaaccatgcatcatcaggagtacggataaaatgcttgatggtcggaagaggcataaattccgtcagccagtttagtctgaccatctcatctgtaacatcattggcaacgctacctttgccatgtttcagaaacaactctggcgcatcgggcttcccatacaatcgatagattgtcgcacctgattgcccgacattatcgcgagcccatttatacccatataaatcagcatccatgttggaatttaatcgcggcttcgagcaagacgtttcccgttgaatatggctcataacaccccttgtattactgtttatgtaagcagacagttttattgttcatgatgatatatttttatcttgtgcaatgtaacatcagagattttgagacacaacgtggctttgttgaataaatcgaacttttgctgagttgaaggatcagatcacgcatcttcccgacaacgcagaccgttccgtggcaaagcaaaagttcaaaatcaccaactggtccacctacaacaaagctctcatcaaccgtggctccctcactttctggctggatgatggggcgattcaggcctggtatgagtcagcaacaccttcttcacgaggcagacctctcgacggatcgttccactgagcgtcagaccccgtagaaaagatcaaaggatcttcttgagatcctttttttctgcgcgtaatctgctgcttgcaaacaaaaaaaccaccgctaccagcggtggtttgtttgccggatcaagagctaccaactctttttccgaaggtaactggcttcagcagagcgcagataccaaatactgtccttctagtgtagccgtagttaggccaccacttcaagaactctgtagcaccgcctacatacctcgctctgctaatcctgttaccagtggctgctgccagtggcgataagtcgtgtcttaccgggttggactcaagacgatagttaccggataaggcgcagcggtcgggctgaacggggggttcgtgcacacagcccagcttggagcgaacgacctacaccgaactgagatacctacagcgtgagcattgagaaagcgccacgcttcccgaagggagaaaggcggacaggtatccggtaagcggcagggtcggaacaggagagcgcacgagggagcttccagggggaaacgcctggtatctttatagtcctgtcgggtttcgccacctctgacttgagcgtcgatttttgtgatgctcgtcaggggggcggagcctatggaaaaacgccagcaacgcggcctttttacggttcctggccttttgctggccttttgctcacatgt

SEQ ID NO: 25 - DNA, 3524 bp, synthetic construct
  source 1..3524: mol_type = other DNA; note = mEPO - MX1561
tctttcctgcgttatcccctgattctgtggataaccgtattaccgcctttgagtgagctgataccgctcgccgcagccgaacgaccgagcgcagcgagtcagtgagcgaggaagcggaagagcgcccaatacgcaaaccgcctctccccgcgcgttggccgattcattaatgcagctggcacgacaggtttcccgactggaaagcgggcagtgagcgcaacgcaattaatgtgagttagctcactcattaggcaccccaggctttacactttatgcttccggctcgtatgttgtgtggaattgtgagcggataacaatttcacacaggaaacagctatgaccatgattacgaattgtaatacgactcactataagcataaaagtctcaacacaacatatacaaaacaaacgaatctcaagcaatcaagcattctacttctattgcagcaatttaaatcatttcttttaaagcaaaagcaattttctgaaaattttcaccatttacgaacgatagcgccatgggagtgcccgagaggcccactctgctgctcctgctgagcctcctgctcatccctctagggctcccagtgctttgtgcgcctcctcggctgatttgcgactcaagagtgctggaaaggtatatcctcgaagccaaggaggcagagaacgtcactatggggtgtgccgaagggccacgactgtccgagaacatcaccgtgcccgatacaaaggtcaatttctatgcctggaagcgcatggaagttgaggaacaggcaattgaggtttggcagggcctgagcctcctttcggaggctatactacaagcccaggccctgttggcaaatagtagccagcccccagaaacactgcagctgcacattgataaggcgatctctggcctgcggagtttaacgtcacttttgagggtactcggcgctcaaaaagagctaatgtccccaccggacacaactcctcccgccccgttgagaaccttaaccgtggatacattttgcaaactgttccgcgtgtacgctaactttcttcggggaaagttaaaattgtacaccggagaggtctgcagacgaggtgaccgctaaactagtagtgactgactaggatctggttaccactaaaccagcctcaagaacacccgaatggagtctctaagctacataataccaacttacacttacaaaatgttgtcccccaaaatgtagccattcgtatctgctcctaataaaaagaaagtttcttcacattctaaaaaaaaaaaaaaaaaaaaaaaaaaaaaaaaaaaaaaaaaaaaaaaaaaaaaaaaaaaaaaaaaaaaaaaaaaaaaaaaaaaaaaaaaaaaaaaaaaaaacttaagcggccgcgaattcgaattcgagctcggtacccggggatcctctagagtcgacctgcaggcatgcaagcttggcactggccgtcgttttacaacgtcgtgactgggaaaaccctggcgttacccaacttaatcgccttgcagcacatccccctttcgccagctggcgtaatagcgaagaggcccgcaccgatcgcccttcccaacagttgcgcagcctgaatggcgaatgcgatttattcaacaaagccgccgtcccgtcaagtcagcgtaatgctctgccagtgttacaaccaattaaccaattctgattagaaaaactcatcgagcatcaaatgaaactgcaatttattcatatcaggattatcaataccatatttttgaaaaagccgtttctgtaatgaaggagaaaactcaccgaggcagttccataggatggcaagatcctggtatcggtctgcgattccgactcgtccaacatcaatacaacctattaatttcccctcgtcaaaaataaggttatcaagtgagaaatcaccatgagtgacgactgaatccggtgagaatggcaaaagcttatgcatttctttccagacttgttcaacaggccagccattacgctcgtcatcaaaatcactcgcatcaaccaaaccgttattcattcgtgattgcgcctgagcgagacgaaatacgcgatcgctgttaaaaggacaattacaaacaggaatcgaatgcaaccggcgcaggaacactgccagcgcatcaacaatattttcacctgaatcaggatattcttctaatacctggaatgctgttttcccggggatcgcagtggtgagtaaccatgcatcatcaggagtacggataaaatgcttgatggtcggaagaggcataaattccgtcagccagtttagtctgaccatctcatctgtaacatcattggcaacgctacctttgccatgtttcagaaacaactctggcgcatcgggcttcccatacaatcgatagattgtcgcacctgattgcccgacattatcgcgagcccatttatacccatataaatcagcatccatgttggaatttaatcgcggcttcgagcaagacgtttcccgttgaatatggctcataacaccccttgtattactgtttatgtaagcagacagttttattgttcatgatgatatatttttatcttgtgcaatgtaacatcagagattttgagacacaacgtggctttgttgaataaatcgaacttttgctgagttgaaggatcagatcacgcatcttcccgacaacgcagaccgttccgtggcaaagcaaaagttcaaaatcaccaactggtccacctacaacaaagctctcatcaaccgtggctccctcactttctggctggatgatggggcgattcaggcctggtatgagtcagcaacaccttcttcacgaggcagacctctcgacggatcgttccactgagcgtcagaccccgtagaaaagatcaaaggatcttcttgagatcctttttttctgcgcgtaatctgctgcttgcaaacaaaaaaaccaccgctaccagcggtggtttgtttgccggatcaagagctaccaactctttttccgaaggtaactggcttcagcagagcgcagataccaaatactgtccttctagtgtagccgtagttaggccaccacttcaagaactctgtagcaccgcctacatacctcgctctgctaatcctgttaccagtggctgctgccagtggcgataagtcgtgtcttaccgggttggactcaagacgatagttaccggataaggcgcagcggtcgggctgaacggggggttcgtgcacacagcccagcttggagcgaacgacctacaccgaactgagatacctacagcgtgagcattgagaaagcgccacgcttcccgaagggagaaaggcggacaggtatccggtaagcggcagggtcggaacaggagagcgcacgagggagcttccagggggaaacgcctggtatctttatagtcctgtcgggtttcgccacctctgacttgagcgtcgatttttgtgatgctcgtcaggggggcggagcctatggaaaaacgccagcaacgcggcctttttacggttcctggccttttgctggccttttgctcacatgt

SEQ ID NO: 26 - DNA, 4814 bp, synthetic construct
  source 1..4814: mol_type = other DNA; note = Rep78 - MX1962
tctttcctgcgttatcccctgattctgtggataaccgtattaccgcctttgagtgagctgataccgctcgccgcagccgaacgaccgagcgcagcgagtcagtgagcgaggaagcggaagagcgcccaatacgcaaaccgcctctccccgcgcgttggccgattcattaatgcagctggcacgacaggtttcccgactggaaagcgggcagtgagcgcaacgcaattaatgtgagttagctcactcattaggcaccccaggctttacactttatgcttccggctcgtatgttgtgtggaattgtgagcggataacaatttcacacaggaaacagctatgaccatgattacgaattgtaatacgactcactataagcataaaagtctcaacacaacatatacaaaacaaacgaatctcaagcaatcaagcattctacttctattgcagcaatttaaatcatttcttttaaagcaaaagcaattttctgaaaattttcaccatttacgaacgatagcgccatgcctgggttctacgaaatcgtgattaaggtgcctagcgacctggatgagcacttaccgggcatctccgacagtttcgttcattgggtggccgagaaagaatgggaactgccccctgactccgacatgaacctaaatttgattgaacaggcgccactgacggtggccgaaaagttacagagggatttcctcaccgaatggcggagagtgtccaaggcacctgaagcgttgttttttgtccagttcgaaaagggtgagtcgtacttccatatgcatgtcctggtggagaccactggagttaagtcaatggtcctcgggagattcctgagccaaatcagggagaagctgattcaaagagtgtatcgcggcattgagcccaccctccctaactggttcgccgtgacaaagaccagaaacggagctggcggcggtaacaaagtcgtggacgagtgctacatcccgaattatcttttgcctaaaactcagccagagctgcagtgggcgtggacaaacatggagcagtacctctcagcatgccttaatctagccgaacgaaaacgactggtggcgcagcacctgacacatgtctcccaaactcaggagcagaataaggagaatcagaatcccaactcagatgcccccgtgatccggagcaaaacctcagcacgttacatggagcttgtaggttggctagttgacaagggcattacgtctgagaaacagtggattcaggaggatcaggccagttatatcagcttcaatgcagcatctaacagcaggagccaaattaaagctgccttagataacgccggaaagataatgagcctcaccaagactgcccctgattacctggtgggccaacaaccggtcgaggacataagttctaacaggatttataaaatactcgaactgaacgggtacgacccccagtacgcagcttctgtttttttgggatgggcaactaaaaagtttgggaaaaggaacaccatctggcttttcgggcccgctactacagggaagacaaacatagccgaagccattgcacacaccgttccattttatgggtgtgttaattggacaaacgagaattttccatttaacgactgcgttgataaaatggtcatctggtgggaggagggcaaaatgacagccaaggtcgtagagtccgctaaagcaatcttgggtggatcgaaggtcagagtcgatcagaagtgtaaaagcagtgctcagattgatcctactccagtgatcgtaacaagcaacacgaatatgtgcgctgtaatagacggaaactccaccacatttgaacaccagcagcccctgcaggatcggatgttcaaattcgaactgacccgtcggctcgaccacgacttcggcaaggttacgaagcaggaagtgaaagatttttttcggtgggctaaagaccatgtcgtagaggtggagcacgaattttacgtgaagaagggaggggccaagaaacgaccagctccctctgacgcagatatttctgaaccaaagagggcccgcgagagcgtggctcaacccagcaccagtgacgctgaagcctcaatcaattatgccgatagatatcaaaacaaatgtagtcgccatgtgggcatgaacctgatgctgtttccatgccgccagtgtgagcgcatgaatcagaattccaatatctgcttcacccacggccagaaggactgtcttgaatgcttccctgtgtcagagagccagcccgtgtctgtggtgaagaaggcctatcaaaaactgtgctacatccaccacatcatgggaaaggtaccagatgcgtgttccgcctgtgacctggtgaatgtcgacctcgatgactgcatctccgagcagtagtgaactagtagtgactgactaggatctggttaccactaaaccagcctcaagaacacccgaatggagtctctaagctacataataccaacttacacttacaaaatgttgtcccccaaaatgtagccattcgtatctgctcctaataaaaagaaagtttcttcacattctaaaaaaaaaaaaaaaaaaaaaaaaaaaaaaaaaaaaaaaaaaaaaaaaaaaaaaaaaaaaaaaaaaaaaaaaaaaaaaaaaaaaaaaaaaaaaaaaaaaaacttaagcggccgcgaattcgaattcgagctcggtacccggggatcctctagagtcgacctgcaggcatgcaagcttggcactggccgtcgttttacaacgtcgtgactgggaaaaccctggcgttacccaacttaatcgccttgcagcacatccccctttcgccagctggcgtaatagcgaagaggcccgcaccgatcgcccttcccaacagttgcgcagcctgaatggcgaatgcgatttattcaacaaagccgccgtcccgtcaagtcagcgtaatgctctgccagtgttacaaccaattaaccaattctgattagaaaaactcatcgagcatcaaatgaaactgcaatttattcatatcaggattatcaataccatatttttgaaaaagccgtttctgtaatgaaggagaaaactcaccgaggcagttccataggatggcaagatcctggtatcggtctgcgattccgactcgtccaacatcaatacaacctattaatttcccctcgtcaaaaataaggttatcaagtgagaaatcaccatgagtgacgactgaatccggtgagaatggcaaaagcttatgcatttctttccagacttgttcaacaggccagccattacgctcgtcatcaaaatcactcgcatcaaccaaaccgttattcattcgtgattgcgcctgagcgagacgaaatacgcgatcgctgttaaaaggacaattacaaacaggaatcgaatgcaaccggcgcaggaacactgccagcgcatcaacaatattttcacctgaatcaggatattcttctaatacctggaatgctgttttcccggggatcgcagtggtgagtaaccatgcatcatcaggagtacggataaaatgcttgatggtcggaagaggcataaattccgtcagccagtttagtctgaccatctcatctgtaacatcattggcaacgctacctttgccatgtttcagaaacaactctggcgcatcgggcttcccatacaatcgatagattgtcgcacctgattgcccgacattatcgcgagcccatttatacccatataaatcagcatccatgttggaatttaatcgcggcttcgagcaagacgtttcccgttgaatatggctcataacaccccttgtattactgtttatgtaagcagacagttttattgttcatgatgatatatttttatcttgtgcaatgtaacatcagagattttgagacacaacgtggctttgttgaataaatcgaacttttgctgagttgaaggatcagatcacgcatcttcccgacaacgcagaccgttccgtggcaaagcaaaagttcaaaatcaccaactggtccacctacaacaaagctctcatcaaccgtggctccctcactttctggctggatgatggggcgattcaggcctggtatgagtcagcaacaccttcttcacgaggcagacctctcgacggatcgttccactgagcgtcagaccccgtagaaaagatcaaaggatcttcttgagatcctttttttctgcgcgtaatctgctgcttgcaaacaaaaaaaccaccgctaccagcggtggtttgtttgccggatcaagagctaccaactctttttccgaaggtaactggcttcagcagagcgcagataccaaatactgtccttctagtgtagccgtagttaggccaccacttcaagaactctgtagcaccgcctacatacctcgctctgctaatcctgttaccagtggctgctgccagtggcgataagtcgtgtcttaccgggttggactcaagacgatagttaccggataaggcgcagcggtcgggctgaacggggggttcgtgcacacagcccagcttggagcgaacgacctacaccgaactgagatacctacagcgtgagcattgagaaagcgccacgcttcccgaagggagaaaggcggacaggtatccggtaagcggcagggtcggaacaggagagcgcacgagggagcttccagggggaaacgcctggtatctttatagtcctgtcgggtttcgccacctctgacttgagcgtcgatttttgtgatgctcgtcaggggggcggagcctatggaaaaacgccagcaacgcggcctttttacggttcctggccttttgctggccttttgctcacatgt

SEQ ID NO: 27 - DNA, 6309 bp, synthetic construct
  source 1..6309: mol_type = other DNA; note = VRC01.23/PGDM1400XePGT121.18_DQ - MX717 Chain 1
tcgcgcgtttcggtgatgacggtgaaaacctctgacacatgcagctcccggagacggtcacagcttgtctgtaagcggatgccgggagcagacaagcccgtcagggcgcgtcagcgggtgttggcgggtgtcggggctggcttaactatgcggcatcagagcagattgtactgagagtgcaccatatgcggtgtgaaataccgcacagatgcgtaaggagaaaataccgcatcagattggctattggccattgcatacgttgtatccatatcataatatgtacatttatattggctcatgtccaacattaccgccatgttgacattgattattgactagttattaatagtaatcaattacggggtcattagttcatagcccatatatggagttccgcgttacataacttacggtaaatggcccgcctggctgaccgcccaacgacccccgcccattgacgtcaataatgacgtatgttcccatagtaacgccaatagggactttccattgacgtcaatgggtggagtatttacggtaaactgcccacttggcagtacatcaagtgtatcatatgccaagtacgccccctattgacgtcaatgacggtaaatggcccgcctggcattatgcccagtacatgaccttatgggactttcctacttggcagtacatctacgtattagtcatcgctattaccatggtgatgcggttttggcagtacatcaatgggcgtggatagcggtttgactcacggggatttccaagtctccaccccattgacgtcaatgggagtttgttttggcaccaaaatcaacgggactttccaaaatgtcgtaacaactccgccccattgacgcaaatgggcggtaggcgtgtacggtgggaggtctatataagcagagctcgtttagtgaaccgtcagatcgcctggagacgccatccacgctgttttgacctccatagaagacaccgggaccgatccagcctccatcggctcgcatctctccttcacgcgcccgccgccctacctgaggccgccatccacgccggttgagtcgcgttctgccgcctcccgcctgtggtgcctcctgaactgcgtccgccgtctaggtaagtttaaagctcaggtcgagaccgggcctttgtccggcgctcccttggagcctacctagactcagccggctctccacgctttgcctgaccctgcttgctcaactctagttaacggtggagggcagtgtagtctgagcagtactcgttgctgccgcgcgcgccaccagacataatagctgacagactaacagactgttcctttccatgggtcttttctgcagtcaccgtcatcgacacgtgtgatcagatatcgcggccgctctagaccaccatgggctggtcctgcatcatcctgtttctggtggccacagccaccggtgtgcactctcagatgcagctccaagagtctggccctggccttgtgaagcctggcgaaacactgagcctgacctgttctgtgtccggcgccagcatcagcagcagctattggagctggctgagagagacacctggcaaaggcctggaatggatcggctacacacaccacagcggcgacaccaattatgcccctagcctgaagtccagagtgcacctgggactgcaccccagcaagaatcaggtgtccctgtctctgaccagcgtgacagccgctgataccgccgtgtactactgcgccagaacactgcatggcagacggatctatggcgtggtggccttcaacgagtactacacctacttctactggcccacctggggcaagggcacccaagtgacagttagctctgacaagacccacacacaggttcacctgacacagtctggacccgaagtgcggaagcctggcacatctgtgaaggtgtcctgtaaagcccctggcaacaccctgaaaacctacgacctgcactgggtccgatctgtgcctggacaaggactgcagtggatgggctggattagccacgagggcgacaagaaagtgatcgtggaacggttcaaggccaaagtgaccatcgactgggacagaagcaccaacaccgcctacctgcagctgagcggactgacatctggcgataccgccgtgtactactgtgccaagggcagcaagcaccggctgagagattacgccctgtacgacgatgacggcgccctgaattgggccgtcgatgtggactacctgagcaacctggaattctggggccagggaacagccgtgacagtgtcatctgacaagacacacaccgcttcgaccaagggcccatccgtgtttcctctggctcccagcagcaagtctacaagcggaggaacagccgctctgggctgcctggtcaaggattactttcccgagcctgtgaccgtgtcctggaattctggcgctctgacaagcggcgtgcacacctttccagctgtgctgcaaagcagcggcctgtactctctgagcagcgtggtcacagtgcctagctctagcctgggcacccagacctacatctgcaatgtgaaccacaagcctagcaacaccaaggtggacaagaaggtggaacccaagagctgcgataagacccacacatgtcctccatgtcctgctccagaactgctcggcggcccttctgtgttcctgtttcctccaaagcctaaggacaccctgatgatcagcagagaccctgaagtgacctgcgtggtggtggatgtgtctcacgaggaccccgaagtgaagttcaattggtacgtggacggcgtggaagtgcacaacgccaagaccaagcctagagaggaacagtacaacagcacctacagagtggtgtccgtgctgcaggtgctgcaccaggattggctgaacggcaaagagtacaagtgcaaggtgtccaacaaggccctgcctgctcctatcgagaaaaccatcagcaaggccaagggccagcctagggaaccccaggtttacacccttcctccatgccgggatgagctgaccaagaaccaggtgtccctgtggtgtctcgtgaagggcttctaccccagcgacattgccgtggaatgggagagcaatggccagcctgagaacaactacaagacaacccctcctgtgctggacagcgacggctcattcttcctgtacagcaagctgacagtcgacaagtccagatggcagcagggcaacgtgttcagttgcagcgtgatgcacgaggccctgcacaaccactacacccagaagtccctgagcctgtctcctggatagtgaggatccagatctgctgtgccttctagttgccagccatctgttgtttgcccctcccccgtgccttccttgaccctggaaggtgccactcccactgtcctttcctaataaaatgaggaaattgcatcgcattgtctgagtaggtgtcattctattctggggggtggggtggggcaggacagcaagggggaggattgggaagacaatagcaggcatgctggggatgcggtgggctctatgggtacccaggtgctgaagaattgacccggttcctcctgggccagaaagaagcaggcacatccccttctctgtgacacaccctgtccacgcccctggttcttagttccagccccactcataggacactcatagctcaggagggctccgccttcaatcccacccgctaaagtacttggagcggtctctccctccctcatcagcccaccaaaccaaacctagcctccaagagtgggaagaaattaaagcaagataggctattaagtgcagagggagagaaaatgcctccaacatgtgaggaagtaatgagagaaatcatagaattttaaggccatgatttaaggccatcatggccttaatcttccgcttcctcgctcactgactcgctgcgctcggtcgttcggctgcggcgagcggtatcagctcactcaaaggcggtaatacggttatccacagaatcaggggataacgcaggaaagaacatgtgagcaaaaggccagcaaaaggccaggaaccgtaaaaaggccgcgttgctggcgtttttccataggctccgcccccctgacgagcatcacaaaaatcgacgctcaagtcagaggtggcgaaacccgacaggactataaagataccaggcgtttccccctggaagctccctcgtgcgctctcctgttccgaccctgccgcttaccggatacctgtccgcctttctcccttcgggaagcgtggcgctttctcatagctcacgctgtaggtatctcagttcggtgtaggtcgttcgctccaagctgggctgtgtgcacgaaccccccgttcagcccgaccgctgcgccttatccggtaactatcgtcttgagtccaacccggtaagacacgacttatcgccactggcagcagccactggtaacaggattagcagagcgaggtatgtaggcggtgctacagagttcttgaagtggtggcctaactacggctacactagaagaacagtatttggtatctgcgctctgctgaagccagttaccttcggaaaaagagttggtagctcttgatccggcaaacaaaccaccgctggtagcggtggtttttttgtttgcaagcagcagattacgcgcagaaaaaaaggatctcaagaagatcctttgatcttttctacggggtctgacgctcagtggaacgaaaactcacgttaagggattttggtcatgagattatcaaaaaggatcttcacctagatccttttaaattaaaaatgaagttttaaatcaatctaaagtatatatgagtaaacttggtctgacagttaccaatgcttaatcagtgaggcacctatctcagcgatctgtctatttcgttcatccatagttgcctgactcggggggggggggcgctgaggtctgcctcgtgaagaaggtgttgctgactcataccaggcctgaatcgccccatcatccagccagaaagtgagggagccacggttgatgagagctttgttgtaggtggaccagttggtgattttgaacttttgctttgccacggaacggtctgcgttgtcgggaagatgcgtgatctgatccttcaactcagcaaaagttcgatttattcaacaaagccgccgtcccgtcaagtcagcgtaatgctctgccagtgttacaaccaattaaccaattctgattagaaaaactcatcgagcatcaaatgaaactgcaatttattcatatcaggattatcaataccatatttttgaaaaagccgtttctgtaatgaaggagaaaactcaccgaggcagttccataggatggcaagatcctggtatcggtctgcgattccgactcgtccaacatcaatacaacctattaatttcccctcgtcaaaaataaggttatcaagtgagaaatcaccatgagtgacgactgaatccggtgagaatggcaaaagcttatgcatttctttccagacttgttcaacaggccagccattacgctcgtcatcaaaatcactcgcatcaaccaaaccgttattcattcgtgattgcgcctgagcgagacgaaatacgcgatcgctgttaaaaggacaattacaaacaggaatcgaatgcaaccggcgcaggaacactgccagcgcatcaacaatattttcacctgaatcaggatattcttctaatacctggaatgctgttttcccggggatcgcagtggtgagtaaccatgcatcatcaggagtacggataaaatgcttgatggtcggaagaggcataaattccgtcagccagtttagtctgaccatctcatctgtaacatcattggcaacgctacctttgccatgtttcagaaacaactctggcgcatcgggcttcccatacaatcgatagattgtcgcacctgattgcccgacattatcgcgagcccatttatacccatataaatcagcatccatgttggaatttaatcgcggccttgagcaagacgtttcccgttgaatatggctcataacaccccttgtattactgtttatgtaagcagacagttttattgttcatgatgatatatttttatcttgtgcaatgtaacatcagagattttgagacacaacgtggctttccccccccccccattattgaagcatttatcagggttattgtctcatgagcggatacatatttgaatgtatttagaaaaataaacaaataggggttccgcgcacatttccccgaaaagtgccacctgacgtctaagaaaccattattatcatgacattaacctataaaaataggcgtatcacgaggccctttcgtc

SEQ ID NO: 28 - DNA, 5475 bp, synthetic construct
  source 1..5475: mol_type = other DNA; note = VRC01.23/PGDM1400XePGT121.18_DQ - MX717 Chain 2
tcgcgcgtttcggtgatgacggtgaaaacctctgacacatgcagctcccggagacggtcacagcttgtctgtaagcggatgccgggagcagacaagcccgtcagggcgcgtcagcgggtgttggcgggtgtcggggctggcttaactatgcggcatcagagcagattgtactgagagtgcaccatatgcggtgtgaaataccgcacagatgcgtaaggagaaaataccgcatcagattggctattggccattgcatacgttgtatccatatcataatatgtacatttatattggctcatgtccaacattaccgccatgttgacattgattattgactagttattaatagtaatcaattacggggtcattagttcatagcccatatatggagttccgcgttacataacttacggtaaatggcccgcctggctgaccgcccaacgacccccgcccattgacgtcaataatgacgtatgttcccatagtaacgccaatagggactttccattgacgtcaatgggtggagtatttacggtaaactgcccacttggcagtacatcaagtgtatcatatgccaagtacgccccctattgacgtcaatgacggtaaatggcccgcctggcattatgcccagtacatgaccttatgggactttcctacttggcagtacatctacgtattagtcatcgctattaccatggtgatgcggttttggcagtacatcaatgggcgtggatagcggtttgactcacggggatttccaagtctccaccccattgacgtcaatgggagtttgttttggcaccaaaatcaacgggactttccaaaatgtcgtaacaactccgccccattgacgcaaatgggcggtaggcgtgtacggtgggaggtctatataagcagagctcgtttagtgaaccgtcagatcgcctggagacgccatccacgctgttttgacctccatagaagacaccgggaccgatccagcctccatcggctcgcatctctccttcacgcgcccgccgccctacctgaggccgccatccacgccggttgagtcgcgttctgccgcctcccgcctgtggtgcctcctgaactgcgtccgccgtctaggtaagtttaaagctcaggtcgagaccgggcctttgtccggcgctcccttggagcctacctagactcagccggctctccacgctttgcctgaccctgcttgctcaactctagttaacggtggagggcagtgtagtctgagcagtactcgttgctgccgcgcgcgccaccagacataatagctgacagactaacagactgttcctttccatgggtcttttctgcagtcaccgtcatcgacacgtgtgatcagatatcgcggccgctctagaccaccatgggctggtcctgcatcatcctgtttctggtggccacagccaccggtgtgcactctgacttcgtgctgacacagtctcctcacagcctgagcgtgacacctggcgagtctgccagcatcagctgcaagtctagccactctctgatccacggcgaccggaacaactacctggcttggtacgtgcagaagcccggcagaagtcctcagctgctgatctacctggccagcagcagagcttctggcgtgcccgatagattttctggcagcggcagcgacaaggacttcaccctgaagattagcagagtggaaaccgaggacgtgggcacctactactgtatgcagggcagagagagcccctggacatttggccagggcaccaaggtggacatcaaggacaagacccacacaagcgatatctctgtggcccctggcgagacagtgcggattacatgtggcggcgagagcatcggaagcagagccgttcagtggtatcagcacagacctggacaggcccctcggctgatcatctacaacaaccaggaccggcctcctggcatccccgagagattttctggcagccccgacatcgatttcggcaccacagccacactgaccatcagcaatgtggaagccggcgacgaggccacctactactgtcacatctgggacagcagacggcccaccaactgggaacttggccctggcacaacactgaccgttctggacaagacacacacccgtacggtggccgctcccagcgtgttcatcttcccacctagcgacgagcagctgaagtccggcacagcctctgtcgtgtgcctgctgaacaacttctacccccgcgaggccaaagtgcagtggaaggtggacaacgccctgcagagcggcaacagccaggaaagcgtgaccgagcaggacagcaaggactccacctacagcctgagcagcaccctgacactgagcaaggccgactacgagaagcacaaggtgtacgcctgcgaagtgacccaccagggcctgtctagccccgtgaccaagagcttcaaccggggcgagtgttagtgaggatccagatctgctgtgccttctagttgccagccatctgttgtttgcccctcccccgtgccttccttgaccctggaaggtgccactcccactgtcctttcctaataaaatgaggaaattgcatcgcattgtctgagtaggtgtcattctattctggggggtggggtggggcaggacagcaagggggaggattgggaagacaatagcaggcatgctggggatgcggtgggctctatgggtacccaggtgctgaagaattgacccggttcctcctgggccagaaagaagcaggcacatccccttctctgtgacacaccctgtccacgcccctggttcttagttccagccccactcataggacactcatagctcaggagggctccgccttcaatcccacccgctaaagtacttggagcggtctctccctccctcatcagcccaccaaaccaaacctagcctccaagagtgggaagaaattaaagcaagataggctattaagtgcagagggagagaaaatgcctccaacatgtgaggaagtaatgagagaaatcatagaattttaaggccatgatttaaggccatcatggccttaatcttccgcttcctcgctcactgactcgctgcgctcggtcgttcggctgcggcgagcggtatcagctcactcaaaggcggtaatacggttatccacagaatcaggggataacgcaggaaagaacatgtgagcaaaaggccagcaaaaggccaggaaccgtaaaaaggccgcgttgctggcgtttttccataggctccgcccccctgacgagcatcacaaaaatcgacgctcaagtcagaggtggcgaaacccgacaggactataaagataccaggcgtttccccctggaagctccctcgtgcgctctcctgttccgaccctgccgcttaccggatacctgtccgcctttctcccttcgggaagcgtggcgctttctcatagctcacgctgtaggtatctcagttcggtgtaggtcgttcgctccaagctgggctgtgtgcacgaaccccccgttcagcccgaccgctgcgccttatccggtaactatcgtcttgagtccaacccggtaagacacgacttatcgccactggcagcagccactggtaacaggattagcagagcgaggtatgtaggcggtgctacagagttcttgaagtggtggcctaactacggctacactagaagaacagtatttggtatctgcgctctgctgaagccagttaccttcggaaaaagagttggtagctcttgatccggcaaacaaaccaccgctggtagcggtggtttttttgtttgcaagcagcagattacgcgcagaaaaaaaggatctcaagaagatcctttgatcttttctacggggtctgacgctcagtggaacgaaaactcacgttaagggattttggtcatgagattatcaaaaaggatcttcacctagatccttttaaattaaaaatgaagttttaaatcaatctaaagtatatatgagtaaacttggtctgacagttaccaatgcttaatcagtgaggcacctatctcagcgatctgtctatttcgttcatccatagttgcctgactcggggggggggggcgctgaggtctgcctcgtgaagaaggtgttgctgactcataccaggcctgaatcgccccatcatccagccagaaagtgagggagccacggttgatgagagctttgttgtaggtggaccagttggtgattttgaacttttgctttgccacggaacggtctgcgttgtcgggaagatgcgtgatctgatccttcaactcagcaaaagttcgatttattcaacaaagccgccgtcccgtcaagtcagcgtaatgctctgccagtgttacaaccaattaaccaattctgattagaaaaactcatcgagcatcaaatgaaactgcaatttattcatatcaggattatcaataccatatttttgaaaaagccgtttctgtaatgaaggagaaaactcaccgaggcagttccataggatggcaagatcctggtatcggtctgcgattccgactcgtccaacatcaatacaacctattaatttcccctcgtcaaaaataaggttatcaagtgagaaatcaccatgagtgacgactgaatccggtgagaatggcaaaagcttatgcatttctttccagacttgttcaacaggccagccattacgctcgtcatcaaaatcactcgcatcaaccaaaccgttattcattcgtgattgcgcctgagcgagacgaaatacgcgatcgctgttaaaaggacaattacaaacaggaatcgaatgcaaccggcgcaggaacactgccagcgcatcaacaatattttcacctgaatcaggatattcttctaatacctggaatgctgttttcccggggatcgcagtggtgagtaaccatgcatcatcaggagtacggataaaatgcttgatggtcggaagaggcataaattccgtcagccagtttagtctgaccatctcatctgtaacatcattggcaacgctacctttgccatgtttcagaaacaactctggcgcatcgggcttcccatacaatcgatagattgtcgcacctgattgcccgacattatcgcgagcccatttatacccatataaatcagcatccatgttggaatttaatcgcggccttgagcaagacgtttcccgttgaatatggctcataacaccccttgtattactgtttatgtaagcagacagttttattgttcatgatgatatatttttatcttgtgcaatgtaacatcagagattttgagacacaacgtggctttccccccccccccattattgaagcatttatcagggttattgtctcatgagcggatacatatttgaatgtatttagaaaaataaacaaataggggttccgcgcacatttccccgaaaagtgccacctgacgtctaagaaaccattattatcatgacattaacctataaaaataggcgtatcacgaggccctttcgtc

SEQ ID NO: 29 - DNA, 5844 bp, synthetic construct
  source 1..5844: mol_type = other DNA; note = VRC01.23/PGDM1400XePGT121.18_DQ - MX717 Chain 3
tcgcgcgtttcggtgatgacggtgaaaacctctgacacatgcagctcccggagacggtcacagcttgtctgtaagcggatgccgggagcagacaagcccgtcagggcgcgtcagcgggtgttggcgggtgtcggggctggcttaactatgcggcatcagagcagattgtactgagagtgcaccatatgcggtgtgaaataccgcacagatgcgtaaggagaaaataccgcatcagattggctattggccattgcatacgttgtatccatatcataatatgtacatttatattggctcatgtccaacattaccgccatgttgacattgattattgactagttattaatagtaatcaattacggggtcattagttcatagcccatatatggagttccgcgttacataacttacggtaaatggcccgcctggctgaccgcccaacgacccccgcccattgacgtcaataatgacgtatgttcccatagtaacgccaatagggactttccattgacgtcaatgggtggagtatttacggtaaactgcccacttggcagtacatcaagtgtatcatatgccaagtacgccccctattgacgtcaatgacggtaaatggcccgcctggcattatgcccagtacatgaccttatgggactttcctacttggcagtacatctacgtattagtcatcgctattaccatggtgatgcggttttggcagtacatcaatgggcgtggatagcggtttgactcacggggatttccaagtctccaccccattgacgtcaatgggagtttgttttggcaccaaaatcaacgggactttccaaaatgtcgtaacaactccgccccattgacgcaaatgggcggtaggcgtgtacggtgggaggtctatataagcagagctcgtttagtgaaccgtcagatcgcctggagacgccatccacgctgttttgacctccatagaagacaccgggaccgatccagcctccatcggctcgcatctctccttcacgcgcccgccgccctacctgaggccgccatccacgccggttgagtcgcgttctgccgcctcccgcctgtggtgcctcctgaactgcgtccgccgtctaggtaagtttaaagctcaggtcgagaccgggcctttgtccggcgctcccttggagcctacctagactcagccggctctccacgctttgcctgaccctgcttgctcaactctagttaacggtggagggcagtgtagtctgagcagtactcgttgctgccgcgcgcgccaccagacataatagctgacagactaacagactgttcctttccatgggtcttttctgcagtcaccgtcatcgacacgtgtgatcagatatcgcggccgctctagaccaccatgggctggtcctgcatcatcctgtttctggtggccacagccaccggtgtgcactctcaggttcagctggttcagtctggcggtcagatgaagaaacccggcgagagcatgcggatcagctgtagagccagcggctacgagttcatcgactgcaccctgaactggatcagactggcccctggcaaaagacccgagtggatgggatggctgaagcccagatggggagccgtgaattacgccagacctctgcagggcagagtgaccatgacacggcagctgtctcaggaccccgacgatcctgattggggcaccgcttttctggaactgagaagcctgaccgtggacgataccgccgtgtacttttgcacgagaggcaagaactgcgactacaactgggacttcgagcactggggcagaggcacacctgtgatcgttagctctgcttcgaccaagggcccatccgtgtttcctctggctcccagcagcaagtctacaagcggaggaacagccgctctgggctgcctggtcaaggattactttcccgagcctgtgaccgtgtcctggaattctggcgctctgacaagcggcgtgcacacctttccagctgtgctgcaaagcagcggcctgtactctctgagcagcgtggtcacagtgcctagctctagcctgggcacccagacctacatctgcaatgtgaaccacaagcctagcaacaccaaggtggacaagaaggtggaacccaagagctgcgataagacccacacatgtcctccatgtcctgctccagaactgctcggcggcccttctgtgttcctgtttcctccaaagcctaaggacaccctgatgatcagcagagaccctgaagtgacctgcgtggtggtggatgtgtctcacgaggaccccgaagtgaagttcaattggtacgtggacggcgtggaagtgcacaacgccaagaccaagcctagagaggaacagtacaacagcacctacagagtggtgtccgtgctgcaggtgctgcaccaggattggctgaacggcaaagagtacaagtgcaaggtgtccaacaaggccctgcctgctcctatcgagaaaaccatcagcaaggccaagggccagcctagggaaccccaggtttgtacccttcctccaagccgggatgagctgaccaagaaccaggtgtccctgagctgtgccgtgaagggcttctaccccagcgacattgccgtggaatgggagagcaatggccagcctgagaacaactacaagacaacccctcctgtgctggacagcgacggctcattcttcctggtgagcaagctgacagtcgacaagtccagatggcagcagggcaacgtgttcagttgcagcgtgatgcacgaggccctgcacaaccactacacccagaagtccctgagcctgtctcctggatagtgaggatccagatctgctgtgccttctagttgccagccatctgttgtttgcccctcccccgtgccttccttgaccctggaaggtgccactcccactgtcctttcctaataaaatgaggaaattgcatcgcattgtctgagtaggtgtcattctattctggggggtggggtggggcaggacagcaagggggaggattgggaagacaatagcaggcatgctggggatgcggtgggctctatgggtacccaggtgctgaagaattgacccggttcctcctgggccagaaagaagcaggcacatccccttctctgtgacacaccctgtccacgcccctggttcttagttccagccccactcataggacactcatagctcaggagggctccgccttcaatcccacccgctaaagtacttggagcggtctctccctccctcatcagcccaccaaaccaaacctagcctccaagagtgggaagaaattaaagcaagataggctattaagtgcagagggagagaaaatgcctccaacatgtgaggaagtaatgagagaaatcatagaattttaaggccatgatttaaggccatcatggccttaatcttccgcttcctcgctcactgactcgctgcgctcggtcgttcggctgcggcgagcggtatcagctcactcaaaggcggtaatacggttatccacagaatcaggggataacgcaggaaagaacatgtgagcaaaaggccagcaaaaggccaggaaccgtaaaaaggccgcgttgctggcgtttttccataggctccgcccccctgacgagcatcacaaaaatcgacgctcaagtcagaggtggcgaaacccgacaggactataaagataccaggcgtttccccctggaagctccctcgtgcgctctcctgttccgaccctgccgcttaccggatacctgtccgcctttctcccttcgggaagcgtggcgctttctcatagctcacgctgtaggtatctcagttcggtgtaggtcgttcgctccaagctgggctgtgtgcacgaaccccccgttcagcccgaccgctgcgccttatccggtaactatcgtcttgagtccaacccggtaagacacgacttatcgccactggcagcagccactggtaacaggattagcagagcgaggtatgtaggcggtgctacagagttcttgaagtggtggcctaactacggctacactagaagaacagtatttggtatctgcgctctgctgaagccagttaccttcggaaaaagagttggtagctcttgatccggcaaacaaaccaccgctggtagcggtggtttttttgtttgcaagcagcagattacgcgcagaaaaaaaggatctcaagaagatcctttgatcttttctacggggtctgacgctcagtggaacgaaaactcacgttaagggattttggtcatgagattatcaaaaaggatcttcacctagatccttttaaattaaaaatgaagttttaaatcaatctaaagtatatatgagtaaacttggtctgacagttaccaatgcttaatcagtgaggcacctatctcagcgatctgtctatttcgttcatccatagttgcctgactcggggggggggggcgctgaggtctgcctcgtgaagaaggtgttgctgactcataccaggcctgaatcgccccatcatccagccagaaagtgagggagccacggttgatgagagctttgttgtaggtggaccagttggtgattttgaacttttgctttgccacggaacggtctgcgttgtcgggaagatgcgtgatctgatccttcaactcagcaaaagttcgatttattcaacaaagccgccgtcccgtcaagtcagcgtaatgctctgccagtgttacaaccaattaaccaattctgattagaaaaactcatcgagcatcaaatgaaactgcaatttattcatatcaggattatcaataccatatttttgaaaaagccgtttctgtaatgaaggagaaaactcaccgaggcagttccataggatggcaagatcctggtatcggtctgcgattccgactcgtccaacatcaatacaacctattaatttcccctcgtcaaaaataaggttatcaagtgagaaatcaccatgagtgacgactgaatccggtgagaatggcaaaagcttatgcatttctttccagacttgttcaacaggccagccattacgctcgtcatcaaaatcactcgcatcaaccaaaccgttattcattcgtgattgcgcctgagcgagacgaaatacgcgatcgctgttaaaaggacaattacaaacaggaatcgaatgcaaccggcgcaggaacactgccagcgcatcaacaatattttcacctgaatcaggatattcttctaatacctggaatgctgttttcccggggatcgcagtggtgagtaaccatgcatcatcaggagtacggataaaatgcttgatggtcggaagaggcataaattccgtcagccagtttagtctgaccatctcatctgtaacatcattggcaacgctacctttgccatgtttcagaaacaactctggcgcatcgggcttcccatacaatcgatagattgtcgcacctgattgcccgacattatcgcgagcccatttatacccatataaatcagcatccatgttggaatttaatcgcggccttgagcaagacgtttcccgttgaatatggctcataacaccccttgtattactgtttatgtaagcagacagttttattgttcatgatgatatatttttatcttgtgcaatgtaacatcagagattttgagacacaacgtggctttccccccccccccattattgaagcatttatcagggttattgtctcatgagcggatacatatttgaatgtatttagaaaaataaacaaataggggttccgcgcacatttccccgaaaagtgccacctgacgtctaagaaaccattattatcatgacattaacctataaaaataggcgtatcacgaggccctttcgtc

SEQ ID NO: 30 - DNA, 5094 bp, synthetic construct
  source 1..5094: mol_type = other DNA; note = VRC01.23/PGDM1400XePGT121.18_DQ - MX717 Chain 4
gaagatcctttgatcttttctacggggtctgacgctcagtggaacgaaaactcacgttaagggattttggtcatgagattatcaaaaaggatcttcacctagatccttttaaattaaaaatgaagttttaaatcaatctaaagtatatatgagtaaacttggtctgacagttaccaatgcttaatcagtgaggcacctatctcagcgatctgtctatttcgttcatccatagttgcctgactcggggggggggggcgctgaggtctgcctcgtgaagaaggtgttgctgactcataccaggcctgaatcgccccatcatccagccagaaagtgagggagccacggttgatgagagctttgttgtaggtggaccagttggtgattttgaacttttgctttgccacggaacggtctgcgttgtcgggaagatgcgtgatctgatccttcaactcagcaaaagttcgatttattcaacaaagccgccgtcccgtcaagtcagcgtaatgctctgccagtgttacaaccaattaaccaattctgattagaaaaactcatcgagcatcaaatgaaactgcaatttattcatatcaggattatcaataccatatttttgaaaaagccgtttctgtaatgaaggagaaaactcaccgaggcagttccataggatggcaagatcctggtatcggtctgcgattccgactcgtccaacatcaatacaacctattaatttcccctcgtcaaaaataaggttatcaagtgagaaatcaccatgagtgacgactgaatccggtgagaatggcaaaagcttatgcatttctttccagacttgttcaacaggccagccattacgctcgtcatcaaaatcactcgcatcaaccaaaccgttattcattcgtgattgcgcctgagcgagacgaaatacgcgatcgctgttaaaaggacaattacaaacaggaatcgaatgcaaccggcgcaggaacactgccagcgcatcaacaatattttcacctgaatcaggatattcttctaatacctggaatgctgttttcccggggatcgcagtggtgagtaaccatgcatcatcaggagtacggataaaatgcttgatggtcggaagaggcataaattccgtcagccagtttagtctgaccatctcatctgtaacatcattggcaacgctacctttgccatgtttcagaaacaactctggcgcatcgggcttcccatacaatcgatagattgtcgcacctgattgcccgacattatcgcgagcccatttatacccatataaatcagcatccatgttggaatttaatcgcggccttgagcaagacgtttcccgttgaatatggctcataacaccccttgtattactgtttatgtaagcagacagttttattgttcatgatgatatatttttatcttgtgcaatgtaacatcagagattttgagacacaacgtggctttccccccccccccattattgaagcatttatcagggttattgtctcatgagcggatacatatttgaatgtatttagaaaaataaacaaataggggttccgcgcacatttccccgaaaagtgccacctgacgtctaagaaaccattattatcatgacattaacctataaaaataggcgtatcacgaggccctttcgtctcgcgcgtttcggtgatgacggtgaaaacctctgacacatgcagctcccggagacggtcacagcttgtctgtaagcggatgccgggagcagacaagcccgtcagggcgcgtcagcgggtgttggcgggtgtcggggctggcttaactatgcggcatcagagcagattgtactgagagtgcaccatatgcggtgtgaaataccgcacagatgcgtaaggagaaaataccgcatcagattggctattggccattgcatacgttgtatccatatcataatatgtacatttatattggctcatgtccaacattaccgccatgttgacattgattattgactagttattaatagtaatcaattacggggtcattagttcatagcccatatatggagttccgcgttacataacttacggtaaatggcccgcctggctgaccgcccaacgacccccgcccattgacgtcaataatgacgtatgttcccatagtaacgccaatagggactttccattgacgtcaatgggtggagtatttacggtaaactgcccacttggcagtacatcaagtgtatcatatgccaagtacgccccctattgacgtcaatgacggtaaatggcccgcctggcattatgcccagtacatgaccttatgggactttcctacttggcagtacatctacgtattagtcatcgctattaccatggtgatgcggttttggcagtacatcaatgggcgtggatagcggtttgactcacggggatttccaagtctccaccccattgacgtcaatgggagtttgttttggcaccaaaatcaacgggactttccaaaatgtcgtaacaactccgccccattgacgcaaatgggcggtaggcgtgtacggtgggaggtctatataagcagagctcgtttagtgaaccgtcagatcgcctggagacgccatccacgctgttttgacctccatagaagacaccgggaccgatccagcctccatcggctcgcatctctccttcacgcgcccgccgccctacctgaggccgccatccacgccggttgagtcgcgttctgccgcctcccgcctgtggtgcctcctgaactgcgtccgccgtctaggtaagtttaaagctcaggtcgagaccgggcctttgtccggcgctcccttggagcctacctagactcagccggctctccacgctttgcctgaccctgcttgctcaactctagttaacggtggagggcagtgtagtctgagcagtactcgttgctgccgcgcgcgccaccagacataatagctgacagactaacagactgttcctttccatgggtcttttctgcagtcaccgtcatcgacacgtgtgatcagatatcgcggccgctctagaccaccatgggctggtcctgcatcatcctgtttctggtggccacagccaccggtgtgcactctctgactcagtctcccggaacactgtcactgagccctggcgagacagccatcatcagctgtcgtacaagccagtacggaagcctggcctggtatcagcaaagacctggacaggcccctcggctggtcatctactctggctctacaagagccgctggcatccccgatagattcagcggaagtagatggggacccgactacaatctgaccatcagcaatctggaaagcggcgacttcggcgtgtactactgccagcagtacgagttctttggccagggcaccaaggtccaggtggacatcaaacgtacggtggccgctcccagcgtgttcatcttcccacctagcgacgagcagctgaagtccggcacagcctctgtcgtgtgcctgctgaacaacttctacccccgcgaggccaaagtgcagtggaaggtggacaacgccctgcagagcggcaacagccaggaaagcgtgaccgagcaggacagcaaggactccacctacagcctgagcagcaccctgacactgagcaaggccgactacgagaagcacaaggtgtacgcctgcgaagtgacccaccagggcctgtctagccccgtgaccaagagcttcaaccggggcgagtgttagtgaggatccagatctgctgtgccttctagttgccagccatctgttgtttgcccctcccccgtgccttccttgaccctggaaggtgccactcccactgtcctttcctaataaaatgaggaaattgcatcgcattgtctgagtaggtgtcattctattctggggggtggggtggggcaggacagcaagggggaggattgggaagacaatagcaggcatgctggggatgcggtgggctctatgggtacccaggtgctgaagaattgacccggttcctcctgggccagaaagaagcaggcacatccccttctctgtgacacaccctgtccacgcccctggttcttagttccagccccactcataggacactcatagctcaggagggctccgccttcaatcccacccgctaaagtacttggagcggtctctccctccctcatcagcccaccaaaccaaacctagcctccaagagtgggaagaaattaaagcaagataggctattaagtgcagagggagagaaaatgcctccaacatgtgaggaagtaatgagagaaatcatagaattttaaggccatgatttaaggccatcatggccttaatcttccgcttcctcgctcactgactcgctgcgctcggtcgttcggctgcggcgagcggtatcagctcactcaaaggcggtaatacggttatccacagaatcaggggataacgcaggaaagaacatgtgagcaaaaggccagcaaaaggccaggaaccgtaaaaaggccgcgttgctggcgtttttccataggctccgcccccctgacgagcatcacaaaaatcgacgctcaagtcagaggtggcgaaacccgacaggactataaagataccaggcgtttccccctggaagctccctcgtgcgctctcctgttccgaccctgccgcttaccggatacctgtccgcctttctcccttcgggaagcgtggcgctttctcatagctcacgctgtaggtatctcagttcggtgtaggtcgttcgctccaagctgggctgtgtgcacgaaccccccgttcagcccgaccgctgcgccttatccggtaactatcgtcttgagtccaacccggtaagacacgacttatcgccactggcagcagccactggtaacaggattagcagagcgaggtatgtaggcggtgctacagagttcttgaagtggtggcctaactacggctacactagaagaacagtatttggtatctgcgctctgctgaagccagttaccttcggaaaaagagttggtagctcttgatccggcaaacaaaccaccgctggtagcggtggtttttttgtttgcaagcagcagattacgcgcagaaaaaaaggatctcaa

SEQ ID NO: 31 - DNA, 6309 bp, synthetic construct
  source 1..6309: mol_type = other DNA; note = VRC01.23/PGDM1400XePGT121.18_LS - MX718 Chain 1
tcgcgcgtttcggtgatgacggtgaaaacctctgacacatgcagctcccggagacggtcacagcttgtctgtaagcggatgccgggagcagacaagcccgtcagggcgcgtcagcgggtgttggcgggtgtcggggctggcttaactatgcggcatcagagcagattgtactgagagtgcaccatatgcggtgtgaaataccgcacagatgcgtaaggagaaaataccgcatcagattggctattggccattgcatacgttgtatccatatcataatatgtacatttatattggctcatgtccaacattaccgccatgttgacattgattattgactagttattaatagtaatcaattacggggtcattagttcatagcccatatatggagttccgcgttacataacttacggtaaatggcccgcctggctgaccgcccaacgacccccgcccattgacgtcaataatgacgtatgttcccatagtaacgccaatagggactttccattgacgtcaatgggtggagtatttacggtaaactgcccacttggcagtacatcaagtgtatcatatgccaagtacgccccctattgacgtcaatgacggtaaatggcccgcctggcattatgcccagtacatgaccttatgggactttcctacttggcagtacatctacgtattagtcatcgctattaccatggtgatgcggttttggcagtacatcaatgggcgtggatagcggtttgactcacggggatttccaagtctccaccccattgacgtcaatgggagtttgttttggcaccaaaatcaacgggactttccaaaatgtcgtaacaactccgccccattgacgcaaatgggcggtaggcgtgtacggtgggaggtctatataagcagagctcgtttagtgaaccgtcagatcgcctggagacgccatccacgctgttttgacctccatagaagacaccgggaccgatccagcctccatcggctcgcatctctccttcacgcgcccgccgccctacctgaggccgccatccacgccggttgagtcgcgttctgccgcctcccgcctgtggtgcctcctgaactgcgtccgccgtctaggtaagtttaaagctcaggtcgagaccgggcctttgtccggcgctcccttggagcctacctagactcagccggctctccacgctttgcctgaccctgcttgctcaactctagttaacggtggagggcagtgtagtctgagcagtactcgttgctgccgcgcgcgccaccagacataatagctgacagactaacagactgttcctttccatgggtcttttctgcagtcaccgtcatcgacacgtgtgatcagatatcgcggccgctctagaccaccatgggctggtcctgcatcatcctgtttctggtggccacagccaccggtgtgcactctcagatgcagctccaagagtctggccctggccttgtgaagcctggcgaaacactgagcctgacctgttctgtgtccggcgccagcatcagcagcagctattggagctggctgagagagacacctggcaaaggcctggaatggatcggctacacacaccacagcggcgacaccaattatgcccctagcctgaagtccagagtgcacctgggactgcaccccagcaagaatcaggtgtccctgtctctgaccagcgtgacagccgctgataccgccgtgtactactgcgccagaacactgcatggcagacggatctatggcgtggtggccttcaacgagtactacacctacttctactggcccacctggggcaagggcacccaagtgacagttagctctgacaagacccacacacaggttcacctgacacagtctggacccgaagtgcggaagcctggcacatctgtgaaggtgtcctgtaaagcccctggcaacaccctgaaaacctacgacctgcactgggtccgatctgtgcctggacaaggactgcagtggatgggctggattagccacgagggcgacaagaaagtgatcgtggaacggttcaaggccaaagtgaccatcgactgggacagaagcaccaacaccgcctacctgcagctgagcggactgacatctggcgataccgccgtgtactactgtgccaagggcagcaagcaccggctgagagattacgccctgtacgacgatgacggcgccctgaattgggccgtcgatgtggactacctgagcaacctggaattctggggccagggaacagccgtgacagtgtcatctgacaagacacacaccgcttcgaccaagggcccatccgtgtttcctctggctcccagcagcaagtctacaagcggaggaacagccgctctgggctgcctggtcaaggattactttcccgagcctgtgaccgtgtcctggaattctggcgctctgacaagcggcgtgcacacctttccagctgtgctgcaaagcagcggcctgtactctctgagcagcgtggtcacagtgcctagctctagcctgggcacccagacctacatctgcaatgtgaaccacaagcctagcaacaccaaggtggacaagaaggtggaacccaagagctgcgataagacccacacatgtcctccatgtcctgctccagaactgctcggcggcccttctgtgttcctgtttcctccaaagcctaaggacaccctgatgatcagcagaacccctgaagtgacctgcgtggtggtggatgtgtctcacgaggaccccgaagtgaagttcaattggtacgtggacggcgtggaagtgcacaacgccaagaccaagcctagagaggaacagtacaacagcacctacagagtggtgtccgtgctgaccgtgctgcaccaggattggctgaacggcaaagagtacaagtgcaaggtgtccaacaaggccctgcctgctcctatcgagaaaaccatcagcaaggccaagggccagcctagggaaccccaggtttacacccttcctccatgccgggatgagctgaccaagaaccaggtgtccctgtggtgtctcgtgaagggcttctaccccagcgacattgccgtggaatgggagagcaatggccagcctgagaacaactacaagacaacccctcctgtgctggacagcgacggctcattcttcctgtacagcaagctgacagtcgacaagtccagatggcagcagggcaacgtgttcagttgcagcgtgctgcacgaggccctgcacagtcactacacccagaagtccctgagcctgtctcctggatagtgaggatccagatctgctgtgccttctagttgccagccatctgttgtttgcccctcccccgtgccttccttgaccctggaaggtgccactcccactgtcctttcctaataaaatgaggaaattgcatcgcattgtctgagtaggtgtcattctattctggggggtggggtggggcaggacagcaagggggaggattgggaagacaatagcaggcatgctggggatgcggtgggctctatgggtacccaggtgctgaagaattgacccggttcctcctgggccagaaagaagcaggcacatccccttctctgtgacacaccctgtccacgcccctggttcttagttccagccccactcataggacactcatagctcaggagggctccgccttcaatcccacccgctaaagtacttggagcggtctctccctccctcatcagcccaccaaaccaaacctagcctccaagagtgggaagaaattaaagcaagataggctattaagtgcagagggagagaaaatgcctccaacatgtgaggaagtaatgagagaaatcatagaattttaaggccatgatttaaggccatcatggccttaatcttccgcttcctcgctcactgactcgctgcgctcggtcgttcggctgcggcgagcggtatcagctcactcaaaggcggtaatacggttatccacagaatcaggggataacgcaggaaagaacatgtgagcaaaaggccagcaaaaggccaggaaccgtaaaaaggccgcgttgctggcgtttttccataggctccgcccccctgacgagcatcacaaaaatcgacgctcaagtcagaggtggcgaaacccgacaggactataaagataccaggcgtttccccctggaagctccctcgtgcgctctcctgttccgaccctgccgcttaccggatacctgtccgcctttctcccttcgggaagcgtggcgctttctcatagctcacgctgtaggtatctcagttcggtgtaggtcgttcgctccaagctgggctgtgtgcacgaaccccccgttcagcccgaccgctgcgccttatccggtaactatcgtcttgagtccaacccggtaagacacgacttatcgccactggcagcagccactggtaacaggattagcagagcgaggtatgtaggcggtgctacagagttcttgaagtggtggcctaactacggctacactagaagaacagtatttggtatctgcgctctgctgaagccagttaccttcggaaaaagagttggtagctcttgatccggcaaacaaaccaccgctggtagcggtggtttttttgtttgcaagcagcagattacgcgcagaaaaaaaggatctcaagaagatcctttgatcttttctacggggtctgacgctcagtggaacgaaaactcacgttaagggattttggtcatgagattatcaaaaaggatcttcacctagatccttttaaattaaaaatgaagttttaaatcaatctaaagtatatatgagtaaacttggtctgacagttaccaatgcttaatcagtgaggcacctatctcagcgatctgtctatttcgttcatccatagttgcctgactcggggggggggggcgctgaggtctgcctcgtgaagaaggtgttgctgactcataccaggcctgaatcgccccatcatccagccagaaagtgagggagccacggttgatgagagctttgttgtaggtggaccagttggtgattttgaacttttgctttgccacggaacggtctgcgttgtcgggaagatgcgtgatctgatccttcaactcagcaaaagttcgatttattcaacaaagccgccgtcccgtcaagtcagcgtaatgctctgccagtgttacaaccaattaaccaattctgattagaaaaactcatcgagcatcaaatgaaactgcaatttattcatatcaggattatcaataccatatttttgaaaaagccgtttctgtaatgaaggagaaaactcaccgaggcagttccataggatggcaagatcctggtatcggtctgcgattccgactcgtccaacatcaatacaacctattaatttcccctcgtcaaaaataaggttatcaagtgagaaatcaccatgagtgacgactgaatccggtgagaatggcaaaagcttatgcatttctttccagacttgttcaacaggccagccattacgctcgtcatcaaaatcactcgcatcaaccaaaccgttattcattcgtgattgcgcctgagcgagacgaaatacgcgatcgctgttaaaaggacaattacaaacaggaatcgaatgcaaccggcgcaggaacactgccagcgcatcaacaatattttcacctgaatcaggatattcttctaatacctggaatgctgttttcccggggatcgcagtggtgagtaaccatgcatcatcaggagtacggataaaatgcttgatggtcggaagaggcataaattccgtcagccagtttagtctgaccatctcatctgtaacatcattggcaacgctacctttgccatgtttcagaaacaactctggcgcatcgggcttcccatacaatcgatagattgtcgcacctgattgcccgacattatcgcgagcccatttatacccatataaatcagcatccatgttggaatttaatcgcggccttgagcaagacgtttcccgttgaatatggctcataacaccccttgtattactgtttatgtaagcagacagttttattgttcatgatgatatatttttatcttgtgcaatgtaacatcagagattttgagacacaacgtggctttccccccccccccattattgaagcatttatcagggttattgtctcatgagcggatacatatttgaatgtatttagaaaaataaacaaataggggttccgcgcacatttccccgaaaagtgccacctgacgtctaagaaaccattattatcatgacattaacctataaaaataggcgtatcacgaggccctttcgtc

SEQ ID NO: 32 - DNA, 5475 bp, synthetic construct; identical to SEQ ID NO: 28
  source 1..5475: mol_type = other DNA; note = VRC01.23/PGDM1400XePGT121.18_LS - MX718 Chain 2

SEQ ID NO: 33 - DNA, 5844 bp, synthetic construct
  source 1..5844: mol_type = other DNA; note = VRC01.23/PGDM1400XePGT121.18_LS - MX718 Chain 3
tcgcgcgtttcggtgatgacggtgaaaacctctgacacatgcagctcccggagacggtcacagcttgtctgtaagcggatgccgggagcagacaagcccgtcagggcgcgtcagcgggtgttggcgggtgtcggggctggcttaactatgcggcatcagagcagattgtactgagagtgcaccatatgcggtgtgaaataccgcacagatgcgtaaggagaaaataccgcatcagattggctattggccattgcatacgttgtatccatatcataatatgtacatttatattggctcatgtccaacattaccgccatgttgacattgattattgactagttattaatagtaatcaattacggggtcattagttcatagcccatatatggagttccgcgttacataacttacggtaaatggcccgcctggctgaccgcccaacgacccccgcccattgacgtcaataatgacgtatgttcccatagtaacgccaatagggactttccattgacgtcaatgggtggagtatttacggtaaactgcccacttggcagtacatcaagtgtatcatatgccaagtacgccccctattgacgtcaatgacggtaaatggcccgcctggcattatgcccagtacatgaccttatgggactttcctacttggcagtacatctacgtattagtcatcgctattaccatggtgatgcggttttggcagtacatcaatgggcgtggatagcggtttgactcacggggatttccaagtctccaccccattgacgtcaatgggagtttgttttggcaccaaaatcaacgggactttccaaaatgtcgtaacaactccgccccattgacgcaaatgggcggtaggcgtgtacggtgggaggtctatataagcagagctcgtttagtgaaccgtcagatcgcctggagacgccatccacgctgttttgacctccatagaagacaccgggaccgatccagcctccatcggctcgcatctctccttcacgcgcccgccgccctacctgaggccgccatccacgccggttgagtcgcgttctgccgcctcccgcctgtggtgcctcctgaactgcgtccgccgtctaggtaagtttaaagctcaggtcgagaccgggcctttgtccggcgctcccttggagcctacctagactcagccggctctccacgctttgcctgaccctgcttgctcaactctagttaacggtggagggcagtgtagtctgagcagtactcgttgctgccgcgcgcgccaccagacataatagctgacagactaacagactgttcctttccatgggtcttttctgcagtcaccgtcatcgacacgtgtgatcagatatcgcggccgctctagaccaccatgggctggtcctgcatcatcctgtttctggtggccacagccaccggtgtgcactctcaggttcagctggttcagtctggcggtcagatgaagaaacccggcgagagcatgcggatcagctgtagagccagcggctacgagttcatcgactgcaccctgaactggatcagactggcccctggcaaaagacccgagtggatgggatggctgaagcccagatggggagccgtgaattacgccagacctctgcagggcagagtgaccatgacacggcagctgtctcaggaccccgacgatcctgattggggcaccgcttttctggaactgagaagcctgaccgtggacgataccgccgtgtacttttgcacgagaggcaagaactgcgactacaactgggacttcgagcactggggcagaggcacacctgtgatcgttagctctgcttcgaccaagggcccatccgtgtttcctctggctcccagcagcaagtctacaagcggaggaacagccgctctgggctgcctggtcaaggattactttcccgagcctgtgaccgtgtcctggaattctggcgctctgacaagcggcgtgcacacctttccagctgtgctgcaaagcagcggcctgtactctctgagcagcgtggtcacagtgcctagctctagcctgggcacccagacctacatctgcaatgtgaaccacaagcctagcaacaccaaggtggacaagaaggtggaacccaagagctgcgataagacccacacatgtcctccatgtcctgctccagaactgctcggcggcccttctgtgttcctgtttcctccaaagcctaaggacaccctgatgatcagcagaacccctgaagtgacctgcgtggtggtggatgtgtctcacgaggaccccgaagtgaagttcaattggtacgtggacggcgtggaagtgcacaacgccaagaccaagcctagagaggaacagtacaacagcacctacagagtggtgtccgtgctgaccgtgctgcaccaggattggctgaacggcaaagagtacaagtgcaaggtgtccaacaaggccctgcctgctcctatcgagaaaaccatcagcaaggccaagggccagcctagggaaccccaggtttgtacccttcctccaagccgggatgagctgaccaagaaccaggtgtccctgagctgtgccgtgaagggcttctaccccagcgacattgccgtggaatgggagagcaatggccagcctgagaacaactacaagacaacccctcctgtgctggacagcgacggctcattcttcctggtgagcaagctgacagtcgacaagtccagatggcagcagggcaacgtgttcagttgcagcgtgctgcacgaggccctgcacagtcactacacccagaagtccctgagcctgtctcctggatagtgaggatccagatctgctgtgccttctagttgccagccatctgttgtttgcccctcccccgtgccttccttgaccctggaaggtgccactcccactgtcctttcctaataaaatgaggaaattgcatcgcattgtctgagtaggtgtcattctattctggggggtggggtggggcaggacagcaagggggaggattgggaagacaatagcaggcatgctggggatgcggtgggctctatgggtacccaggtgctgaagaattgacccggttcctcctgggccagaaagaagcaggcacatccccttctctgtgacacaccctgtccacgcccctggttcttagttccagccccactcataggacactcatagctcaggagggctccgccttcaatcccacccgctaaagtacttggagcggtctctccctccctcatcagcccaccaaaccaaacctagcctccaagagtgggaagaaattaaagcaagataggctattaagtgcagagggagagaaaatgcctccaacatgtgaggaagtaatgagagaaatcatagaattttaaggccatgatttaaggccatcatggccttaatcttccgcttcctcgctcactgactcgctgcgctcggtcgttcggctgcggcgagcggtatcagctcactcaaaggcggtaatacggttatccacagaatcaggggataacgcaggaaagaacatgtgagcaaaaggccagcaaaaggccaggaaccgtaaaaaggccgcgttgctggcgtttttccataggctccgcccccctgacgagcatcacaaaaatcgacgctcaagtcagaggtggcgaaacccgacaggactataaagataccaggcgtttccccctggaagctccctcgtgcgctctcctgttccgaccctgccgcttaccggatacctgtccgcctttctcccttcgggaagcgtggcgctttctcatagctcacgctgtaggtatctcagttcggtgtaggtcgttcgctccaagctgggctgtgtgcacgaaccccccgttcagcccgaccgctgcgccttatccggtaactatcgtcttgagtccaacccggtaagacacgacttatcgccactggcagcagccactggtaacaggattagcagagcgaggtatgtaggcggtgctacagagttcttgaagtggtggcctaactacggctacactagaagaacagtatttggtatctgcgctctgctgaagccagttaccttcggaaaaagagttggtagctcttgatccggcaaacaaaccaccgctggtagcggtggtttttttgtttgcaagcagcagattacgcgcagaaaaaaaggatctcaagaagatcctttgatcttttctacggggtctgacgctcagtggaacgaaaactcacgttaagggattttggtcatgagattatcaaaaaggatcttcacctagatccttttaaattaaaaatgaagttttaaatcaatctaaagtatatatgagtaaacttggtctgacagttaccaatgcttaatcagtgaggcacctatctcagcgatctgtctatttcgttcatccatagttgcctgactcggggggggggggcgctgaggtctgcctcgtgaagaaggtgttgctgactcataccaggcctgaatcgccccatcatccagccagaaagtgagggagccacggttgatgagagctttgttgtaggtggaccagttggtgattttgaacttttgctttgccacggaacggtctgcgttgtcgggaagatgcgtgatctgatccttcaactcagcaaaagttcgatttattcaacaaagccgccgtcccgtcaagtcagcgtaatgctctgccagtgttacaaccaattaaccaattctgattagaaaaactcatcgagcatcaaatgaaactgcaatttattcatatcaggattatcaataccatatttttgaaaaagccgtttctgtaatgaaggagaaaactcaccgaggcagttccataggatggcaagatcctggtatcggtctgcgattccgactcgtccaacatcaatacaacctattaatttcccctcgtcaaaaataaggttatcaagtgagaaatcaccatgagtgacgactgaatccggtgagaatggcaaaagcttatgcatttctttccagacttgttcaacaggccagccattacgctcgtcatcaaaatcactcgcatcaaccaaaccgttattcattcgtgattgcgcctgagcgagacgaaatacgcgatcgctgttaaaaggacaattacaaacaggaatcgaatgcaaccggcgcaggaacactgccagcgcatcaacaatattttcacctgaatcaggatattcttctaatacctggaatgctgttttcccggggatcgcagtggtgagtaaccatgcatcatcaggagtacggataaaatgcttgatggtcggaagaggcataaattccgtcagccagtttagtctgaccatctcatctgtaacatcattggcaacgctacctttgccatgtttcagaaacaactctggcgcatcgggcttcccatacaatcgatagattgtcgcacctgattgcccgacattatcgcgagcccatttatacccatataaatcagcatccatgttggaatttaatcgcggccttgagcaagacgtttcccgttgaatatggctcataacaccccttgtattactgtttatgtaagcagacagttttattgttcatgatgatatatttttatcttgtgcaatgtaacatcagagattttgagacacaacgtggctttccccccccccccattattgaagcatttatcagggttattgtctcatgagcggatacatatttgaatgtatttagaaaaataaacaaataggggttccgcgcacatttccccgaaaagtgccacctgacgtctaagaaaccattattatcatgacattaacctataaaaataggcgtatcacgaggccctttcgtc

SEQ ID NO: 34 - DNA, 5094 bp, synthetic construct; identical to SEQ ID NO: 30
  source 1..5094: mol_type = other DNA; note = VRC01.23/PGDM1400XePGT121.18_LS - MX718 Chain 4

SEQ ID NO: 35 - DNA, 2839 bp, synthetic construct
  source 1..2839: mol_type = other DNA; note = AAV2 ITR_CMVR_EGFP_Tbgh vector
cagctgcgcgctcgctcgctcactgaggccgcccgggcaaagcccgggcgtcgggcgacctttggtcgcccggcctcagtgagcgagcgagcgcgcagagagggagtggccaactccatcactaggggttccttgtagttaatgattaacccgccatgctacttatctacgtagccatgctctagcggcctcggcctctgcataaataaaaaaaattagtcagccatgagcttggccccattgcatacgttgtatccatatcataatatgtacatttatattggctcatgtccaacattaccgccatgttgacattgattattgactagttattaatagtaatcaattacggggtcattagttcatagcccatatatggagttccgcgttacataacttacggtaaatggcccgcctggctgaccgcccaacgacccccgcccattgacgtcaataatgacgtatgttcccatagtaacgccaatagggactttccattgacgtcaatgggtggagtatttacggtaaactgcccacttggcagtacatcaagtgtatcatatgccaagtacgccccctattgacgtcaatgacggtaaatggcccgcctggcattatgcccagtacatgaccttatgggactttcctacttggcagtacatctacgtattagtcatcgctattaccatggtgatgcggttttggcagtacatcaatgggcgtggatagcggtttgactcacggggatttccaagtctccaccccattgacgtcaatgggagtttgttttggcaccaaaatcaacgggactttccaaaatgtcgtaacaactccgccccattgacgcaaatgggcggtaggcgtgtacggtgggaggtctatataagcagagctcgtttagtgaaccgtcagatcgcctggagacgccatccacgctgttttgacctccatagaagacaccgggaccgatccagcctccatcggctcgcatctctccttcacgcgcccgccgccctacctgaggccgccatccacgccggttgagtcgcgttctgccgcctcccgcctgtggtgcctcctgaactgcgtccgccgtctaggtaagtttaaagctcaggtcgagaccgggcctttgtccggcgctcccttggagcctacctagactcagccggctctccacgctttgcctgaccctgcttgctcaactctagttaacggtggagggcagtgtagtctgagcagtactcgttgctgccgcgcgcgccaccagacataatagctgacagactaacagactgttcctttccatgggtctttttgcagtcaccgtcgtcgacacgtgtgatcagatatcgcggccgctctagacaccatggtgagcaagggcgaggagctgttcaccggggtggtgcccatcctggtcgagctgtacggcgacgtaaacggccacaagttcagcgtgtccggcgagggcgagggcgatgccacctacggcaagctgaccctgaagttcatctgcaccaccggcaagctgcccgtgccctggcccaccctcgtgaccaccctgacctacggcgtgcagtgcttcagccgctaccccgaccacatgaagcagcacgacttcttcaagtccgccatgcccgaaggctacgtccaggagcgcaccatcttcttcaaggacgacggcaactacaagacccgcgccgaggtgaagttcgagggcgacaccctggtgaaccgcatcgagctgaagggcatcgacttcaaggaggacggcaacatcctggggcacaagctggagtacaactacaacagccacaacgtctatatcatggccgacaagcagaagaacggcatcaaggtgaacttcaagatccgccacaacatcgaggacggcagcgtgcagctcgccgaccactaccagcagaacacccccatcggcgacggccccgtgctgctgcccgacaaccactacctgagcacccagtccgccctgagcaaagaccccaacgagaagcgcgatcacatggtcctgctggagttcgtgaccgccgccgggatcactctcggcatggatgagctgtacaagtgaggatccagatctgctgtgccttctagttgccagccatctgttgtttgcccctcccccgtgccttccttgaccctggaaggtgccactcccactgtcctttcctaataaaatgaggaaattgcatcgcattgtctgagtaggtgtcattctattctggggggtggggtggggcaggacagcaagggggaggattgggaagacaatagcaggcatgctggggatgcggtgggctctatgggtacccaggtgctgaagaattgacccggttcctcctgggccagaaagaagcaggcacatccccttctctgtgacacaccctgtccacgcccctggttcttagttccagccccactcataggacactcatagctcaggagggctccgccttcaatcccacccgctaaagtacttggagcggtctctccctccctcatcagcccaccaaaccaaacctagcctccaagagtgggaagaaattaaagcaagataggctattaagtgcagagggagagaaaatgcctccaacatgtgaggaagtaatgagagaaatcatagaattttaatagagcatggctacgtagataagtagcatggcgggttaatcattaactacaaggaacccctagtgatggagttggccactccctctctgcgcgctcgctcgctcactgaggccgggcgaccaaaggtcgcccgacgcccgggctttgcccgggcggcctcagtgagcgagcgagcgcgcagctg

SEQ ID NO: 36 - protein, 239 aa, synthetic construct; identical to SEQ ID NO: 5
  source 1..239: note = EGFP

SEQ ID NO: 37 - DNA, 18 bp, synthetic construct
  source 1..18: mol_type = other DNA; note = T7 promoter
taatacgactcactatag

SEQ ID NO: 38 - DNA, 2270 bp, synthetic construct
  source 1..2270: mol_type = other DNA; note = AAV2_REP78_IVT vector
tctcaacacaacatatacaaaacaaacgaatctcaagcaatcaagcattctacttctattgcagcaatttaaatcatttcttttaaagcaaaagcaattttctgaaaattttcaccatttacgaacgatagcgccatgcctgggttctacgaaatcgtgattaaggtgcctagcgacctggatgagcacttaccgggcatctccgacagtttcgttcattgggtggccgagaaagaatgggaactgccccctgactccgacatgaacctaaatttgattgaacaggcgccactgacggtggccgaaaagttacagagggatttcctcaccgaatggcggagagtgtccaaggcacctgaagcgttgttttttgtccagttcgaaaagggtgagtcgtacttccatatgcatgtcctggtggagaccactggagttaagtcaatggtcctcgggagattcctgagccaaatcagggagaagctgattcaaagagtgtatcgcggcattgagcccaccctccctaactggttcgccgtgacaaagaccagaaacggagctggcggcggtaacaaagtcgtggacgagtgctacatcccgaattatcttttgcctaaaactcagccagagctgcagtgggcgtggacaaacatggagcagtacctctcagcatgccttaatctagccgaacgaaaacgactggtggcgcagcacctgacacatgtctcccaaactcaggagcagaataaggagaatcagaatcccaactcagatgcccccgtgatccggagcaaaacctcagcacgttacatggagcttgtaggttggctagttgacaagggcattacgtctgagaaacagtggattcaggaggatcaggccagttatatcagcttcaatgcagcatctaacagcaggagccaaattaaagctgccttagataacgccggaaagataatgagcctcaccaagactgcccctgattacctggtgggccaacaaccggtcgaggacataagttctaacaggatttataaaatactcgaactgaacgggtacgacccccagtacgcagcttctgtttttttgggatgggcaactaaaaagtttgggaaaaggaacaccatctggcttttcgggcccgctactacagggaagacaaacatagccgaagccattgcacacaccgttccattttatgggtgtgttaattggacaaacgagaattttccatttaacgactgcgttgataaaatggtcatctggtgggaggagggcaaaatgacagccaaggtcgtagagtccgctaaagcaatcttgggtggatcgaaggtcagagtcgatcagaagtgtaaaagcagtgctcagattgatcctactccagtgatcgtaacaagcaacacgaatatgtgcgctgtaatagacggaaactccaccacatttgaacaccagcagcccctgcaggatcggatgttcaaattcgaactgacccgtcggctcgaccacgacttcggcaaggttacgaagcaggaagtgaaagatttttttcggtgggctaaagaccatgtcgtagaggtggagcacgaattttacgtgaagaagggaggggccaagaaacgaccagctccctctgacgcagatatttctgaaccaaagagggcccgcgagagcgtggctcaacccagcaccagtgacgctgaagcctcaatcaattatgccgatagatatcaaaacaaatgtagtcgccatgtgggcatgaacctgatgctgtttccatgccgccagtgtgagcgcatgaatcagaattccaatatctgcttcacccacggccagaaggactgtcttgaatgcttccctgtgtcagagagccagcccgtgtctgtggtgaagaaggcctatcaaaaactgtgctacatccaccacatcatgggaaaggtaccagatgcgtgttccgcctgtgacctggtgaatgtcgacctcgatgactgcatctccgagcagtagtgaactagtagtgactgactaggatctggttaccactaaaccagcctcaagaacacccgaatggagtctctaagctacataataccaacttacacttacaaaatgttgtcccccaaaatgtagccattcgtatctgctcctaataaaaagaaagtttcttcacattctaaaaaaaaaaaaaaaaaaaaaaaaaaaaaaaaaaaaaaaaaaaaaaaaaaaaaaaaaaaaaaaaaaaaaaaaaaaaaaaaaaaaaaaaaaaaaaaaaaaaa

SEQ ID NO: 39 - protein, 621 aa, synthetic construct; identical to SEQ ID NO: 9
  source 1..621: note = AAV2 Rep78 (Genbank QDH44117.1)

SEQ ID NO: 40 - protein, 742 aa, synthetic construct
  source 1..742: note = Bispecific CD19xCD20 CAR - MX1954
MGWSCIILFLVATATGVHSDIQLTQSPSFLSASVGDRVTITCKASQSVDYSGDSYLNWYQQKPGKAPKLLIYDASNLVSGVPSRFSGSGSGTEFTLTISSLQPEDFATYYCQQSTENPWTFGGGTKLEIKGGSSGEIVLTQSPATLSLSPGERATLSCRASQSVSSYLAWYQQKPGQAPRLLIYDASNRATGIPARFSGSGSGTDFTLTISSLEPEDFAVYYCQQRSNWPITFGQGTRLEIKGGGGSGGSGSGGGGSASGSGEVQLVESGGGLVQPGRSLRLSCAASGFTFNDYAMHWVRQAPGKGLEWVSTISWNSGSIGYADSVKGRFTISRDNAKKSLYLQMNSLRAEDTALYYCAKDIQYGNYYYGMDVWGQGTTVTVSSGGSSGQVQLVQSGAEVKKPGSSVKVSCKASGYAFSSYWMNWVRQAPGQGLEWMGQIWPGDSDTNYAQKFQGRVTITADESTSTAYMELSSLRSEDTAVYYCARRETTTVGRYYYAMDYWGQGTTVTVSSASGGSGTTTPAPRPPTPAPTIASQPLSLRPEACRPAAGGAVHTRGLDFACDIYIWAPLAGTCGVLLLSLVITLYCKRGRKKLLYIFKQPFMRPVQTTQEEDGCSCRFPEEEEGGCELRVKFSRSADAPAYQQGQNQLYNELNLGRREEYDVLDKRRGRDPEMGGKPRRKNPQEGLYNELQKDKMAEAYSEIGMKGERRRGKGHDGLYQGLSTATKDTYDALHMQALPPR

SEQ ID NO: 41 - DNA, 2232 bp, synthetic construct
  source 1..2232: mol_type = other DNA; note = Bispecific CD19xCD20 CAR - MX1954
atggggtggtcctgcatcattttgtttctcgtggccacagcgaccggtgtgcattccgacatacagctgactcagtctccaagctttctgagtgcgtcagtgggcgacagagtgaccatcacgtgtaaagcgagtcagagtgtggattacagcggcgacagctacctgaactggtatcaacagaagcccgggaaagccccgaaactgttgatctatgacgcctccaatctggtgtccggtgtacccagtcggttttcaggcagcggaagtggcaccgagttcaccttaaccatttctagtctccagcctgaggactttgctacctattattgccagcagagtacagagaacccctggacatttggtgggggaacaaaactggaaatcaagggggggtcctctggagagattgttctgactcagtcgcccgccacactgtcactttccccaggcgaacgcgcgacactcagctgtcgtgcctcacaaagcgtctcctcgtacttagcctggtatcagcagaagcctggacaggctccccggttgctgatctacgatgccagcaatcgcgccactggtatccccgccaggttctcgggctccgggagcggcaccgattttactctgactatatcaagcctagaaccagaggacttcgcggtgtattattgccaacagagaagtaactggcccatcacgtttgggcagggcacgaggttggaaatcaagggaggcggaggatcagggggatcgggaagtgggggcggtggatctgcttctggctcgggcgaggtgcagctggttgaatctggcggaggactggtccaaccggggcgtagtctccggctgtcttgtgcagccagcgggtttaccttcaacgactatgccatgcactgggtccgacaggccccaggcaaaggacttgaatgggtgtccaccatctcctggaattcaggctctatcggctacgccgattccgtgaaaggcaggttcaccatctccagagacaacgcgaaaaagtccctgtaccttcagatgaacagccttagggccgaggacactgccctctactactgcgccaaggacatacagtacggcaattactactacgggatggacgtgtgggggcagggtacaacagtgacagtctcatcaggagggagttcagggcaggttcagctggtgcaatccggtgcagaagttaagaaacctggtagcagcgtgaaggtgtcctgcaaggcctccggttatgccttctcaagctactggatgaactgggtccgacaggcacctggacaagggttggaatggatgggccaaatttggccaggcgacagcgatactaattatgcacagaagttccaggggagagtgactatcaccgcagacgagtctacaagcaccgcgtatatggaacttagttcattgaggagcgaggacactgcagtgtattactgtgcaaggcgggaaaccaccactgtaggcagatattattacgctatggactactggggccaggggaccacagtaacagtctcctccgctagcggcgggtccggaacaacaacgcctgctccacgcccgcctacgccagctccaacaattgccagtcaaccactgagcctgaggccggaagcttgtcgacctgctgctggtggagcagtgcatacaagaggactggatttcgcctgcgatatttacatttgggctcccctggctggcacgtgtggcgttctgttacttagcctggtcattactctttattgcaagcggggtagaaaaaagctcctgtacatcttcaagcaacccttcatgcggcccgtacagaccacccaggaggaagatggttgttcctgccgattccccgaggaggaagaaggcggttgcgagctgcgcgtcaagttcagccgctccgcagatgctcctgcctatcagcagggacagaatcagttatataacgagctcaatctcgggcgcagagaagagtacgatgtccttgacaagcggcgtggcagggatccggagatgggcgggaagccccgccggaagaatcctcaagagggcctctataatgagctgcagaaggacaagatggccgaggcctactcagagatcggaatgaagggcgagcgcaggagaggcaagggacacgatggactatatcaggggctcagcaccgctaccaaagatacctatgatgccctccacatgcaggctttacctcctcggtagtga

SEQ ID NO: 42 - protein, 719 aa, synthetic construct
  source 1..719: note = Bispecific CD19xCD20 CAR - MX1955
MNRGVPFRHLLLVLQLALLPAATQGDIQLTQSPSFLSASVGDRVTITCKASQSVDYSGDSYLNWYQQKPGKAPKLLIYDASNLVSGVPSRFSGSGSGTEFTLTISSLQPEDFATYYCQQSTENPWTFGGGTKLEIKGGSSGEIVLTQSPATLSLSPGERATLSCRASQSVSSYLAWYQQKPGQAPRLLIYDASNRATGIPARFSGSGSGTDFTLTISSLEPEDFAVYYCQQRSNWPITFGQGTRLEIKGGGGSGGSGSGGGGSASGSGEVQLVESGGGLVQPGRSLRLSCAASGFTFNDYAMHWVRQAPGKGLEWVSTISWNSGSIGYADSVKGRFTISRDNAKKSLYLQMNSLRAEDTALYYCAKDIQYGNYYYGMDVWGQGTTVTVSSGGSSGQVQLVQSGAEVKKPGSSVKVSCKASGYAFSSYWMNWVRQAPGQGLEWMGQIWPGDSDTNYAQKFQGRVTITADESTSTAYMELSSLRSEDTAVYYCARRETTTVGRYYYAMDYWGQGTTVTVSSASGGSGESNIKVLPTWSTPVQPMALIVLGGVAGLLLFIGLGIFFCVKRGRKKLLYIFKQPFMRPVQTTQEEDGCSCRFPEEEEGGCELRVKFSRSADAPAYQQGQNQLYNELNLGRREEYDVLDKRRGRDPEMGGKPRRKNPQEGLYNELQKDKMAEAYSEIGMKGERRRGKGHDGLYQGLSTATKDTYDALHMQALPPR

SEQ ID NO: 43 - DNA, 2160 bp, synthetic construct
  source 1..2160: mol_type = other DNA; note = Bispecific CD19xCD20 CAR - MX1955
atgaatagaggggtgccatttagacacttgctgctcgtcctgcagctcgccctcctaccagccgccacacagggggatatacaattaactcaaagtccctcctttctttcagcctcagtgggtgacagagtaacaattacgtgcaaagcatcacagtctgtcgactatagcggcgacagctatctgaattggtatcagcagaaacccggaaaggccccaaagctcctgatttatgacgcatcgaatctcgtgtccggtgtaccttccagattctccggatcagggtcaggaaccgagttcacccttacaatcagctcccttcagcctgaggattttgcaacctactactgtcaacagagcaccgagaacccttggacgttcggtggcggcacaaaactggaaatcaaggggggctcttctggcgagattgttctcacccagagtccagctacactttccctaagtccgggcgagcgggcgacccttagttgccgagcctcccagagcgtgtcttcctacctggcttggtatcagcagaagcccggacaggccccgaggctgcttatatacgatgcgtcaaaccgcgcaaccggcatcccagcccgattcagtggcagtggaagcgggaccgactttacgctgacaatctcctctttagaaccggaagattttgcggtctattactgccagcaaagatccaactggcccatcactttcggtcaggggactagattggaaatcaaggggggaggcggttccggcggttcaggaagtggcggaggcggttcagcctccggctcaggtgaagtgcagttggtcgagtctggggggggactggtccagccgggccgaagtttaaggctctcttgcgcagccagcggcttcaccttcaacgactacgcgatgcactgggtgcggcaggctcctggaaaagggctggagtgggtgagcacaatctcctggaactctggaagcattggttacgctgattccgttaaggggcggtttactatttctagggacaacgccaagaagtccctatatctacaaatgaatagcctgcgcgctgaagataccgcattgtactattgcgcaaaagacatccagtacggcaattactattacggcatggacgtctggggccagggcacaacggtgaccgtctcatctggggggagcagtggccaagtgcagctggtgcagtccggcgccgaagtcaaaaaacctggcagtagcgtgaaggtgagttgtaaagccagcgggtacgccttctcctcatactggatgaattgggtcagacaggctcccgggcaaggtttggagtggatgggtcagatatggccaggagatagcgatacaaactatgcccaaaagtttcaggggcgcgtgactataactgccgacgagagcactagcacagcttacatggaactgtctagcctgcgtagcgaggacacggctgtgtactactgcgctcgccgagagaccacaaccgttggccgttactactatgccatggattattggggccagggaactaccgttactgtgtcttcggcatcgggaggttcgggcgaaagcaacatcaaagtgctgcctacctggtcaactcccgttcaaccaatggctctcatcgtgctgggaggggtggcgggactcctgctcttcattggattgggcatttttttctgtgtaaaacggggacgcaagaagttgttatacatcttcaagcagccctttatgaggcccgtacagactacccaggaggaggatggatgttcttgtcggtttccagaggaggaggaaggcgggtgcgaactccgtgttaagttcagtcgcagcgccgacgcccctgcttatcagcagggacaaaatcagctgtacaacgagctgaatttaggccggcgcgaagagtatgacgtactggacaagaggagaggacgggaccccgaaatgggaggcaaacccaggaggaagaaccctcaggagggtctctataatgagctgcaaaaagataaaatggctgaagcatactctgaaattggtatgaaaggcgagcggaggcgaggaaagggacatgatgggctgtaccaaggactttccacagctaccaaggacacatatgatgcactgcacatgcaggcgctcccacctaggtga

SEQ ID NO: 44 - protein, 720 aa, synthetic construct
  source 1..720: note = Bispecific CD19xCD20 CAR - MX1956
MALPVTALLLPLALLLHAARPDIQLTQSPSFLSASVGDRVTITCKASQSVDYSGDSYLNWYQQKPGKAPKLLIYDASNLVSGVPSRFSGSGSGTEFTLTISSLQPEDFATYYCQQSTENPWTFGGGTKLEIKGGSSGGSEIVLTQSPATLSLSPGERATLSCRASQSVSSYLAWYQQKPGQAPRLLIYDASNRATGIPARFSGSGSGTDFTLTISSLEPEDFAVYYCQQRSNWPITFGQGTRLEIKGGGGSGGSGSGGGGSASGSGEVQLVESGGGLVQPGRSLRLSCAASGFTFNDYAMHWVRQAPGKGLEWVSTISWNSGSIGYADSVKGRFTISRDNAKKSLYLQMNSLRAEDTALYYCAKDIQYGNYYYGMDVWGQGTTVTVSSGGSSGGSQVQLVQSGAEVKKPGSSVKVSCKASGYAFSSYWMNWVRQAPGQGLEWMGQIWPGDSDTNYAQKFQGRVTITADESTSTAYMELSSLRSEDTAVYYCARRETTTVGRYYYAMDYWGQGTTVTVSSASGGSGRPAAGGAVHTRGLDFASDIYIWAPLAGTCGVLLLSLVITLYKRGRKKLLYIFKQPFMRPVQTTQEEDGCSCRFPEEEEGGCELRVKFSRSADAPAYQQGQNQLYNELNLGRREEYDVLDKRRGRDPEMGGKPRRKNPQEGLYNELQKDKMAEAYSEIGMKGERRRGKGHDGLYQGLSTATKDTYDALHMQALPPR

SEQ ID NO: 45 - DNA, 2163 bp, synthetic construct
  source 1..2163: mol_type = other DNA; note = Bispecific CD19xCD20 CAR - MX1956
atggctctgccagtgacggcgctgttgctgcctcttgcgctactgttacacgccgccaggccagatatacaactgacccagtctccttccttcctgtccgccagtgttggcgaccgtgtgactattacctgtaaagcaagccagagtgttgattactcaggcgactcatatttaaactggtaccagcaaaagcccggcaaggctcctaagctgctgatttacgacgcgagtaacctcgtatcgggggtcccttctaggtttagtggttccggaagtggcaccgaatttacgctaaccatcagctctcttcagcccgaagattttgcgacttattactgtcaacagtcgacagaaaacccttggacattcgggggggggacaaaattggagataaaaggcgggtccagcgggggatcggaaattgtgcttacccagagtcccgctactctgtccctctcaccaggcgagagggcgaccttgagctgtagagcttctcagtctgtcagcagttacctcgcttggtatcagcagaagccaggacaggccccccggctgctgatctacgacgcctcaaatagggccactggcattccggcaagattctccggttccggcagtggtacagactttaccctaacaattagttccctggagcctgaggacttcgcggtttattactgccagcagcggagcaactggccgatcactttcggccaggggaccagactcgaaattaaggggggagggggatctggaggctctgggagcggcggcgggggctcagcctctgggtccggagaggtacagttggtggagtccggtggtggtcttgtccagcccgggagaagccttcgcctctcctgtgccgcatccggatttaccttcaatgactacgctatgcactgggtacgccaggcacctggcaagggcctggaatgggtctctactatctcgtggaatagcggcagcattgggtacgcagattcagtgaagggtcgtttcacaatatctcgcgataacgccaaaaaatctctctatctccagatgaatagcctccgagcagaagatactgctttgtactactgcgccaaagatattcagtacggaaactactattacggcatggacgtttggggacagggtactactgtgaccgtgtctagcggaggatcaagcgggggcagccaagtgcaactggtccagagcggagccgaggttaagaagccagggagctccgtgaaggtcagctgcaaagctagcggctacgccttctcatcctactggatgaactgggtccggcaggccccgggccagggcctcgagtggatgggacaaatctggcccggcgacagtgataccaattatgcccaaaagttccagggaagagtgactatcacggctgacgagagcacttcaacagcatacatggagttaagttccttaaggagcgaggacaccgcagtgtattactgtgccaggcgggagacaaccacagttggaagatactactatgccatggattattgggggcagggtacgaccgtgactgtgtccagcgcaagtggtggatctggccgacccgctgctggaggagccgtccatacccgagggctggattttgcctcagacatctacatctgggcacccctcgccggcacatgcggcgtcctgctgttgtctcttgtgataacactgtacaagcggggtcgcaagaaactcctctatatcttcaagcagccctttatgcggccagtgcaaaccacacaagaggaagatggttgctcatgccgctttccagaggaagaggaaggtgggtgcgagcttagagtgaaattctctcgatccgctgatgcacctgcttaccagcagggccagaatcagctatataatgagttgaacctgggcagacgcgaagaatatgacgtactggacaaaaggagagggagggacccagagatggggggaaaaccccggcgtaagaacccacaagagggcctgtacaatgaattacaaaaggacaaaatggctgaagcatattcagagatcggcatgaagggggaaaggcgacggggaaagggtcacgatggactgtatcaaggcctgtccacagccaccaaagacacgtatgatgcccttcatatgcaggccctgccgcctcgctga

SEQ ID NO: 46 - protein, 721 aa, synthetic construct
  source 1..721: note = Bispecific CD19xCD20 CAR - MX1957
MALPVTALLLPLALLLHAARPDIQLTQSPSFLSASVGDRVTITCKASQSVDYSGDSYLNWYQQKPGKAPKLLIYDASNLVSGVPSRFSGSGSGTEFTLTISSLQPEDFATYYCQQSTENPWTFGGGTKLEIKGGSSGGGGGSEIVLTQSPATLSLSPGERATLSCRASQSVSSYLAWYQQKPGQAPRLLIYDASNRATGIPARFSGSGSGTDFTLTISSLEPEDFAVYYCQQRSNWPITFGQGTRLEIKGGSGSGGGGSASGSGEVQLVESGGGLVQPGRSLRLSCAASGFTFNDYAMHWVRQAPGKGLEWVSTISWNSGSIGYADSVKGRFTISRDNAKKSLYLQMNSLRAEDTALYYCAKDIQYGNYYYGMDVWGQGTTVTVSSGGSSGGGGGSQVQLVQSGAEVKKPGSSVKVSCKASGYAFSSYWMNWVRQAPGQGLEWMGQIWPGDSDTNYAQKFQGRVTITADESTSTAYMELSSLRSEDTAVYYCARRETTTVGRYYYAMDYWGQGTTVTVSSASGGSGRPAAGGAVHTRGLDFASDIYIWAPLAGTCGVLLLSLVITLYKRGRKKLLYIFKQPFMRPVQTTQEEDGCSCRFPEEEEGGCELRVKFSRSADAPAYQQGQNQLYNELNLGRREEYDVLDKRRGRDPEMGGKPRRKNPQEGLYNELQKDKMAEAYSEIGMKGERRRGKGHDGLYQGLSTATKDTYDALHMQALPPR

SEQ ID NO: 47 - DNA, 2166 bp, synthetic construct
  source 1..2166: mol_type = other DNA; note = Bispecific CD19xCD20 CAR - MX1957
atggctctgccagtgacggcgctgttgctgcctcttgcgctactgttacacgccgccaggccagatatacaactgacccagtctccttccttcctgtccgccagtgttggcgaccgtgtgactattacctgtaaagcaagccagagtgttgattactcaggcgactcatatttaaactggtaccagcaaaagcccggcaaggctcctaagctgctgatttacgacgcgagtaacctcgtatcgggggtcccttctaggtttagtggttccggaagtggcaccgaatttacgctaaccatcagctctcttcagcccgaagattttgcgacttattactgtcaacagtcgacagaaaacccttggacattcgggggggggacaaaattggagataaaaggcggttcctcaggaggtggaggcgggtcggaaattgtgcttacccagagtcccgctactctgtccctctcaccaggcgagagggcgaccttgagctgtagagcttctcagtctgtcagcagttacctcgcttggtatcagcagaagccaggacaggccccccggctgctgatctacgacgcctcaaatagggccactggcattccggcaagattctccggttccggcagtggtacagactttaccctaacaattagttccctggagcctgaggacttcgcggtttattactgccagcagcggagcaactggccgatcactttcggccaggggaccagactcgaaattaaggggggaagcgggagtggcggtgggggtagcgcaagtggaagtggtgaggtacagttggtggagtccggtggtggtcttgtccagcccgggagaagccttcgcctctcctgtgccgcatccggatttaccttcaatgactacgctatgcactgggtacgccaggcacctggcaagggcctggaatgggtctctactatctcgtggaatagcggcagcattgggtacgcagattcagtgaagggtcgtttcacaatatctcgcgataacgccaaaaaatctctctatctccagatgaatagcctccgagcagaagatactgctttgtactactgcgccaaagatattcagtacggaaactactattacggcatggacgtttggggacagggtactactgtgaccgtgtctagcggcggctccagcggaggcggcggcgggtcccaagtgcaactggtccagagcggagccgaggttaagaagccagggagctccgtgaaggtcagctgcaaagctagcggctacgccttctcatcctactggatgaactgggtccggcaggccccgggccagggcctcgagtggatgggacaaatctggcccggcgacagtgataccaattatgcccaaaagttccagggaagagtgactatcacggctgacgagagcacttcaacagcatacatggagttaagttccttaaggagcgaggacaccgcagtgtattactgtgccaggcgggagacaaccacagttggaagatactactatgccatggattattgggggcagggtacgaccgtgactgtgtccagcgcaagtggtggatctggccgacccgctgctggaggagccgtccatacccgagggctggattttgcctcagacatctacatctgggcacccctcgccggcacatgcggcgtcctgctgttgtctcttgtgataacactgtacaagcggggtcgcaagaaactcctctatatcttcaagcagccctttatgcggccagtgcaaaccacacaagaggaagatggttgctcatgccgctttccagaggaagaggaaggtgggtgcgagcttagagtgaaattctctcgatccgctgatgcacctgcttaccagcagggccagaatcagctatataatgagttgaacctgggcagacgcgaagaatatgacgtactggacaaaaggagagggagggacccagagatggggggaaaaccccggcgtaagaacccacaagagggcctgtacaatgaattacaaaaggacaaaatggctgaagcatattcagagatcggcatgaagggggaaaggcgacggggaaagggtcacgatggactgtatcaaggcctgtccacagccaccaaagacacgtatgatgcccttcatatgcaggccctgccgcctcgctga

SEQ ID NO: 48 - protein, 193 aa, synthetic construct; identical to SEQ ID NO: 6
  source 1..193: note = hEPO gene in AAV2 ITR-hEPO vector  - MX1959

SEQ ID NO: 49 - DNA, 582 bp, synthetic construct
  source 1..582: mol_type = other DNA; note = hEPO gene in AAV2 ITR-hEPO vector  - MX1959
atgggtgttcacgaatgccccgcatggctgtggcttctgttgagcctcctcagcctgcctcttggactgccggtcctcggcgccccccctagattaatctgtgactcaagggtgctcgagcggtatttgcttgaggccaaggaggcagagaatataacaaccgggtgcgcagaacattgtagcctgaatgagaacattaccgttcccgacactaaagtgaatttttacgcctggaaaagaatggaagtggggcagcaagctgtggaggtctggcaaggcttggctctactcagtgaggccgtgctgcgcggacaggctctgctggtcaactcctcccagccatgggaaccactacagcttcacgtagataaggccgtgagtgggctgcgatccctgactacgctgttacgcgctctaggagcgcagaaggaagctatctcacctccagatgccgcaagcgccgcgcccctccggacaatcaccgcagatacttttaggaagctcttccgggtatattcgaacttcctgagaggcaaactgaagttgtacacaggtgaggcctgccgtaccggcgacaggtga

SEQ ID NO: 50 - protein, 239 aa, synthetic construct; identical to SEQ ID NO: 7
  source 1..239: note = mCherry gene in AAV2 ITR-mCherry vector - MX1960

SEQ ID NO: 51 - DNA, 720 bp, synthetic construct
  source 1..720: mol_type = other DNA; note = mCherry gene in AAV2 ITR-mCherry vector - MX1960
atggtatccaaaggcgaagaggacaatatggctatcatcaaagagtttatgcggttcaaggtgcacatggagggatcagtaaatgggcacgagtttgaaattgaaggagagggagaaggccgaccttacgagggaacgcagacagccaagctgaaagtgacaaagggcgggccactcccattcgcctgggatatattaagcccccagttcatgtatgggtccaaggcgtacgtgaagcatccagctgatatccccgattatttgaaactgagctttccggagggcttcaaatgggaaagagtcatgaattttgaagacgggggtgttgtcactgtcacacaggatagcagcctccaagacggcgaattcatatataaggtgaagctgagagggactaacttccccagtgacgggcctgttatgcaaaaaaagacaatgggctgggaggctagtagcgagcgcatgtatcccgaagacggcgccctaaaaggggaaattaagcagaggctgaagcttaaagacggtggacactacgatgccgaggtgaagactacctacaaggcaaaaaagcctgtgcagctgccaggtgcatataacgtcaacatcaagctcgatatcacctcacataatgaggactacaccattgtggagcagtacgagagggcagagggccggcactcgaccggaggaatggacgaactgtacaaatccggcaactga

SEQ ID NO: 52 - protein, 192 aa, synthetic construct; identical to SEQ ID NO: 8
  source 1..192: note = mEPO gene in AAV2 ITR-mEPO vector  - MX1961

SEQ ID NO: 53 - DNA, 576 bp, synthetic construct
  source 1..576: mol_type = other DNA; note = mEPO gene in AAV2 ITR-mEPO vector  - MX1961
atgggagtgcccgagaggcccactctgctgctcctgctgagcctcctgctcatccctctagggctcccagtgctttgtgcgcctcctcggctgatttgcgactcaagagtgctggaaaggtatatcctcgaagccaaggaggcagagaacgtcactatggggtgtgccgaagggccacgactgtccgagaacatcaccgtgcccgatacaaaggtcaatttctatgcctggaagcgcatggaagttgaggaacaggcaattgaggtttggcagggcctgagcctcctttcggaggctatactacaagcccaggccctgttggcaaatagtagccagcccccagaaacactgcagctgcacattgataaggcgatctctggcctgcggagtttaacgtcacttttgagggtactcggcgctcaaaaagagctaatgtccccaccggacacaactcctcccgccccgttgagaaccttaaccgtggatacattttgcaaactgttccgcgtgtacgctaactttcttcggggaaagttaaaattgtacaccggagaggtctgcagacgaggtgaccgc

SEQ ID NO: 54 - protein, 550 aa, synthetic construct
  source 1..550: note = Luciferase gene in AAV2 ITR-Luc vector
MEDAKNIKKGPAPFYPLEDGTAGEQLHKAMKRYALVPGTIAFTDAHIEVDITYAEYFEMSVRLAEAMKRYGLNTNHRIVVCSENSLQFFMPVLGALFIGVAVAPANDIYNERELLNSMGISQPTVVFVSKKGLQKILNVQKKLPIIQKIIIMDSKTDYQGFQSMYTFVTSHLPPGFNEYDFVPESFDRDKTIALIMNSSGSTGLPKGVALPHRTACVRFSHARDPIFGNQIIPDTAILSVVPFHHGFGMFTTLGYLICGFRVVLMYRFEEELFLRSLQDYKIQSALLVPTLFSFFAKSTLIDKYDLSNLHEIASGGAPLSKEVGEAVAKRFHLPGIRQGYGLTETTSAILITPEGDDKPGAVGKVVPFFEAKVVDLDTGKTLGVNQRGELCVRGPMIMSGYVNNPEATNALIDKDGWLHSGDIAYWDEDEHFFIVDRLKSLIKYKGYQVAPAELESILLQHPNIFDAGVAGLPDDDAGELPAAVVVLEHGKTMTEKEIVDYVASQVTTAKKLRGGVVFVDEVPKGLTGKLDARKIREILIKAKKGGKIAV

SEQ ID NO: 55 - DNA, 1656 bp, synthetic construct
  source 1..1656: mol_type = other DNA; note = Luciferase gene in AAV2 ITR-Luc vector
atggaagatgccaaaaacattaagaagggcccagcgccattctacccactcgaagacgggaccgccggcgagcagctgcacaaagccatgaagcgctacgccctggtgcccggcaccatcgcctttaccgacgcacatatcgaggtggacattacctacgccgagtacttcgagatgagcgttcggctggcagaagctatgaagcgctatgggctgaatacaaaccatcggatcgtggtgtgcagcgagaatagcttgcagttcttcatgcccgtgttgggtgccctgttcatcggtgtggctgtggccccagctaacgacatctacaacgagcgcgagctgctgaacagcatgggcatcagccagcccaccgtcgtattcgtgagcaagaaagggctgcaaaagatcctcaacgtgcaaaagaagctaccgatcatacaaaagatcatcatcatggatagcaagaccgactaccagggcttccaaagcatgtacaccttcgtgacttcccatttgccacccggcttcaacgagtacgacttcgtgcccgagagcttcgaccgggacaaaaccatcgccctgatcatgaacagtagtggcagtaccggattgcccaagggcgtagccctaccgcaccgcaccgcttgtgtccgattcagtcatgcccgcgaccccatcttcggcaaccagatcatccccgacaccgctatcctcagcgtggtgccatttcaccacggcttcggcatgttcaccacgctgggctacttgatctgcggctttcgggtcgtgctcatgtaccgcttcgaggaggagctattcttgcgcagcttgcaagactataagattcaatctgccctgctggtgcccacactatttagcttcttcgctaagagcactctcatcgacaagtacgacctaagcaacttgcacgagatcgccagcggcggggcgccgctcagcaaggaggtaggtgaggccgtggccaaacgcttccacctaccaggcatccgccagggctacggcctgacagaaacaaccagcgccattctgatcacccccgaaggggacgacaagcctggcgcagtaggcaaggtggtgcccttcttcgaggctaaggtggtggacttggacaccggtaagacactgggtgtgaaccagcgcggcgagctgtgcgtccgtggccccatgatcatgagcggctacgttaacaaccccgaggctacaaacgctctcatcgacaaggacggctggctgcacagcggcgacatcgcctactgggacgaggacgagcacttcttcatcgtggaccggctgaagagcctgatcaaatacaagggctaccaggtagccccagccgaactggagagcatcctgctgcaacaccccaacatcttcgacgccggggtcgccggcctgcccgacgacgatgccggcgagctgcccgccgcagtcgtcgtgctggaacacggtaaaaccatgaccgagaaggagatcgtggactatgtggccagccaggttacaaccgccaagaagctgcgcggtggtgttgtgttcgtggacgaggtgcctaaaggactgaccggcaagttggacgcccgcaagatccgcgagattctcattaaggccaagaagggcggcaagatcgccgtgtaataa

SEQ ID NO: 56 - protein, 1880 aa, synthetic construct
  source 1..1880: note = Anti-COVID E12xE8 bispecific Ab in AAV2 ITR vector
EIVLTQSPGTLSLSPGETATLSCRASQSFSSDLAWYQQKPGQAPRLLIYGASSRATGIPDRFSGSGSGTDFTLTISRLEPADFAVYYCQQYGSSPPVTFGGGTKVEIKRTVAAPSVFIFPPSDEQLKSGTASVVCLLNNFYPREAKVQWKVDNALQSGNSQESVTEQDSKDSTYSLSSTLTLSKADYEKHKVYACEVTHQGLSSPVTKSFNRGECGGGGSGGGGSGGGGSDTVMTQSPLSLPVTPGEPASISCRSSQSLLNSNGYNYLDWYVQKPGQSPQLLIYLGSNRASGVPDRFSGSGSGTDFTLKISRVEAEDVGVYYCMQPLQTPLFTFGPGTKVEIKGGGGSGGSGSGGGGSASGSGQVTLRESGPALVKPTQTLTLTCTFSGFSLSTRGVCVSWIRQPPGKALEWLAFIDWDDDKYYNTSLKTRLTISKDTSKNQVVLTMTNVHPVDTATYYCARISSHHGSSWCTTFDYWGQGALVTVSAGGSSGEVQLVESGGGLIQPGGSLRLSCAASGVIVSYNYMNWVRQAPGKGLEWVSVIYSGGSTFYADSVRGRFTISRDNSKNTLYLQMNSLRAEDTAVYYCARDLGPAGAFDIWGLGTMVTVSSASTKGPSVFPLAPSSKSTSGGTAALGCLVKDYFPEPVTVSWNSGALTSGVHTFPAVLQSSGLYSLSSVVTVPSSSLGTQTYICNVNHKPSNTKVDKKVEPKSCDKTHTCPPCPAPELLGGPSVFLFPPKPKDTLMISRTPEVTCVVVDVSHEDPEVKFNWYVDGVEVHNAKTKPREEQYNSTYRVVSVLTVLHQDWLNGKEYKCKVSNKALPAPIEKTISKAKGQPREPQVYTLPPSRDELTKNQVSLTCLVKGFYPSDIAVEWESNGQPENNYKTTPPVLDSDGSFFLYSKLTVDKSRWQQGNVFSCSVLHEALHAHYTQKSLSLSPGEIVLTQSPGTLSLSPGETATLSCRASQSFSSDLAWYQQKPGQAPRLLIYGASSRATGIPDRFSGSGSGTDFTLTISRLEPADFAVYYCQQYGSSPPVTFGGGTKVEIKRTVAAPSVFIFPPSDEQLKSGTASVVCLLNNFYPREAKVQWKVDNALQSGNSQESVTEQDSKDSTYSLSSTLTLSKADYEKHKVYACEVTHQGLSSPVTKSFNRGECGGGGSGGGGSGGGGSDTVMTQSPLSLPVTPGEPASISCRSSQSLLNSNGYNYLDWYVQKPGQSPQLLIYLGSNRASGVPDRFSGSGSGTDFTLKISRVEAEDVGVYYCMQPLQTPLFTFGPGTKVEIKGGGGSGGSGSGGGGSASGSGQVTLRESGPALVKPTQTLTLTCTFSGFSLSTRGVCVSWIRQPPGKALEWLAFIDWDDDKYYNTSLKTRLTISKDTSKNQVVLTMTNVHPVDTATYYCARISSHHGSSWCTTFDYWGQGALVTVSAGGSSGEVQLVESGGGLIQPGGSLRLSCAASGVIVSYNYMNWVRQAPGKGLEWVSVIYSGGSTFYADSVRGRFTISRDNSKNTLYLQMNSLRAEDTAVYYCARDLGPAGAFDIWGLGTMVTVSSASTKGPSVFPLAPSSKSTSGGTAALGCLVKDYFPEPVTVSWNSGALTSGVHTFPAVLQSSGLYSLSSVVTVPSSSLGTQTYICNVNHKPSNTKVDKKVEPKSCDKTHTCPPCPAPELLGGPSVFLFPPKPKDTLMISRTPEVTCVVVDVSHEDPEVKFNWYVDGVEVHNAKTKPREEQYNSTYRVVSVLTVLHQDWLNGKEYKCKVSNKALPAPIEKTISKAKGQPREPQVYTLPPSRDELTKNQVSLTCLVKGFYPSDIAVEWESNGQPENNYKTTPPVLDSDGSFFLYSKLTVDKSRWQQGNVFSCSVLHEALHAHYTQKSLSLSPG

SEQ ID NO: 57 - DNA, 2880 bp, synthetic construct
  source 1..2880: mol_type = other DNA; note = Anti-COVID E12xE8 bispecific Ab in AAV2 ITR vector
atgggctggtcctgcatcatcctgtttctggtggccacagccaccggtgtgcactctgagatcgtgctgacacagagccctggcacactgtcactgtctccaggcgaaacagccacactgagctgtagagccagccagagcttcagcagcgacctggcttggtatcagcagaagcctggacaggcccctcggctgttgatctatggcgcctcttctagagccacaggcatccccgatagattcagcggctctggcagcggcaccgatttcaccctgacaatcagcagactggaacccgccgacttcgccgtgtactactgtcagcagtacggcagcagccctcctgtgacatttggcggcggaacaaaggtggaaatcaaacgtacggtggccgctcccagcgtgttcatcttcccacctagcgacgagcagctgaagtccggcacagcctctgtcgtgtgcctgctgaacaacttctacccccgcgaggccaaagtgcagtggaaggtggacaacgccctgcagagcggcaacagccaggaaagcgtgaccgagcaggacagcaaggactccacctacagcctgagcagcaccctgacactgagcaaggccgactacgagaagcacaaggtgtacgcctgcgaagtgacccaccagggcctgtctagccccgtgaccaagagcttcaaccggggcgagtgtggcggcggaggatctggcggaggtggaagcggaggcggtggaagcgacaccgtgatgacacagagccctctgagcctgcctgtgacacctggcgaacctgccagcatcagctgtagaagcagccagagcctgctgaacagcaacggctacaactacctggattggtacgtgcagaagcccggccagtctcctcagctgctgatctacctgggcagcaatagagccagcggcgtgcccgatagattttctggctctggcagcggcaccgacttcaccctgaagatctctagagtggaagccgaggacgtgggcgtgtactactgtatgcagcctctgcagacccctctgttcacatttggccctggcaccaaggtggaaatcaaaggaggtggtggctctggcggatctgggagtggtggcggaggctctgcttctggatctggacaagtgacactgagagagtctggccccgctctggtcaagcctacacagaccctgacactgacctgcaccttcagcggcttcagcctgtctactagaggcgtgtgcgtgtcctggatcagacagcctcctggaaaggccctggaatggctggccttcatcgactgggacgacgacaagtactacaacaccagcctgaaaacccggctgaccatcagcaaggacaccagcaagaaccaggtggtgctgaccatgaccaacgtgcaccctgtggataccgccacctactactgcgccagaatcagctctcaccacggctccagctggtgtaccaccttcgattattggggccagggcgctctcgtgacagtttctgctggaggcagctccggggaagtgcagctggtggaatcaggcggcggactgattcaacctggcggctctctgagactgtcttgtgctgcttctggcgtgatcgtgtcctacaactacatgaactgggtccgacaggctcccggcaaaggccttgaatgggtgtccgtgatctacagcggcggcagcaccttttacgccgattctgtgcggggcagattcaccatcagccgggacaacagcaagaacaccctgtacctgcagatgaacagcctgagagccgaggacaccgctgtgtactattgcgccagagatctgggacctgccggcgcttttgatatctggggcctgggcacaatggtcaccgtgtctagcgcttcgaccaagggcccatccgtgtttcctctggctcccagcagcaagtctacaagcggaggaacagccgctctgggctgcctggtcaaggattactttcccgagcctgtgaccgtgtcctggaattctggcgctctgacaagcggcgtgcacacctttccagctgtgctgcaaagcagcggcctgtactctctgagcagcgtggtcacagtgcctagctctagcctgggcacccagacctacatctgcaatgtgaaccacaagcctagcaacaccaaggtggacaagaaggtggaacccaagagctgcgataagacccacacatgtcctccatgtcctgctccagaactgctcggcggcccttctgtgttcctgtttcctccaaagcctaaggacaccctgatgatcagcagaacccctgaagtgacctgcgtggtggtggatgtgtctcacgaggaccccgaagtgaagttcaattggtacgtggacggcgtggaagtgcacaacgccaagaccaagcctagagaggaacagtacaacagcacctacagagtggtgtccgtgctgaccgtgctgcaccaggattggctgaacggcaaagagtacaagtgcaaggtgtccaacaaggccctgcctgctcctatcgagaaaaccatcagcaaggccaagggccagcctagggaaccccaggtttacacccttcctccaagccgggatgagctgaccaagaaccaggtgtccctgacatgtctcgtgaagggcttctaccccagcgacattgccgtggaatgggagagcaatggccagcctgagaacaactacaagacaacccctcctgtgctggacagcgacggctcattcttcctgtacagcaagctgacagtcgacaagtccagatggcagcagggcaacgtgttcagttgcagcgtgctgcacgaggccctgcacgctcactacacccagaagtccctgagcctgtctcctggatag

SEQ ID NO: 58 - DNA, 145 bp, synthetic construct
  source 1..145: mol_type = other DNA; note = 5 ITR AAV
ttggccactccctctctgcgcgctcgctcgctcactgaggccgggcgaccaaaggtcgcccgacgcccgggctttgcccgggcggcctcagtgagcgagcgagcgcgcagagagggagtggccaactccatcactaggggttcct

SEQ ID NO: 59 - DNA, 145 bp, synthetic construct
  source 1..145: mol_type = other DNA; note = 3 ITR AAV
aggaacccctagtgatggagttggccactccctctctgcgcgctcgctcgctcactgaggccgggcgaccaaaggtcgcccgacgcccgggctttgcccgggcggcctcagtgagcgagcgagcgcgcagagagggagtggccaa

SEQ ID NO: 60 - DNA, 143 bp, synthetic construct
  source 1..143: mol_type = other DNA; note = AAV1  5 ITR
ttgcccactccctctctgcgcgctcgctcgctcggtggggcctgcggaccaaaggtccgcagacggcagagctctgctctgccggccccaccgagcgagcgagcgcgcagagagggagtgggcaactccatcactaggggtaa

SEQ ID NO: 61 - DNA, 143 bp, synthetic construct
  source 1..143: mol_type = other DNA; note = AAV1  3 ITR
ttacccctagtgatggagttgcccactccctctctgcgcgctcgctcgctcggtggggccggcagagcagagctctgccgtctgcggacctttggtccgcaggccccaccgagcgagcgagcgcgcagagagggagtgggcaa

SEQ ID NO: 62 - DNA, 145 bp, synthetic construct; identical to SEQ ID NO: 58
  source 1..145: mol_type = other DNA; note = AAV2 5 ITR

SEQ ID NO: 63 - DNA, 145 bp, synthetic construct
  source 1..145: mol_type = other DNA; note = AAV2 3 ITR
aggaacccctagtgatggagttggccactccctctctgcgcgctcgctcgctcactgaggccgcccgggcaaagcccgggcgtcgggcgacctttggtcgcccggcctcagtgagcgagcgagcgcgcagagagggagtggccaa

SEQ ID NO: 64 - DNA, 143 bp, synthetic construct
  source 1..143: mol_type = other DNA; note = AAV3A 5 ITR
ttggccactccctctatgcgcactcgctcgctcggtggggcctggcgaccaaaggtcgccagacggacgtgctttgcacgtccggccccaccgagcgagcgagtgcgcatagagggagtggccaactccatcactagaggtat

SEQ ID NO: 65 - DNA, 143 bp, synthetic construct
  source 1..143: mol_type = other DNA; note = AAV3A 3 ITR
atacctctagtgatggagttggccactccctctatgcgcactcgctcgctcggtggggccggacgtgcaaagcacgtccgtctggcgacctttggtcgccaggccccaccgagcgagcgagtgcgcatagagggagtggccaa

SEQ ID NO: 66 - DNA, 146 bp, synthetic construct
  source 1..146: mol_type = other DNA; note = AAV4 5 ITR
ttggccactccctctatgcgcgctcgctcactcactcggccctggagaccaaaggtctccagactgccggcctctggccggcagggccgagtgagtgagcgagcgcgcatagagggagtggccaactccatcatctaggtttgccc

SEQ ID NO: 67 - DNA, 146 bp, synthetic construct
  source 1..146: mol_type = other DNA; note = AAV4 3 ITR
gggcaaacctagatgatggagttggccactccctctatgcgcgctcgctcactcactcggccctgccggccagaggccggcagtctggagacctttggtctccagggccgagtgagtgagcgagcgcgcatagagggagtggccaa

SEQ ID NO: 68-70 - skipped (3 entries)

SEQ ID NO: 71 - DNA, 161 bp, synthetic construct
  source 1..161: mol_type = other DNA; note = AAV6 3 ITR
atacccctagtgagggagttgcccactccctctatgcgcgctcgctcgctcggtggggcctgcggaccaaaggtccgcagacggcagaggtctcctctgccggccccaccgagcgagcgagcgcgcatagagggagtgggcaactccatcactaggggtat

SEQ ID NO: 72 - DNA, 145 bp, synthetic construct
  source 1..145: mol_type = other DNA; note = AAV7 5 ITR
ttggccactccctctatgcgcgctcgctcgctcggtggggcctgcggaccaaaggtccgcagacggcagagctctgctctgccggccccaccgagcgagcgagcgcgcatagagggagtggccaactccatcactaggggtaccg

SEQ ID NO: 73 - DNA, 145 bp, synthetic construct
  source 1..145: mol_type = other DNA; note = AAV7 3 ITR
cggtacccctagtgatggagttggccactccctctatgcgcgctcgctcgctcggtggggccggcagagcagagctctgccgtctgcggacctttggtccgcaggccccaccgagcgagcgagcgcgcatagagggagtggccaa

SEQ ID NO: 74-85 - skipped (12 entries)

SEQ ID NO: 86 - protein, 623 aa, synthetic construct
  source 1..623: note = AAV1 Rep 78
MPGFYEIVIKVPSDLDEHLPGISDSFVSWVAEKEWELPPDSDMDLNLIEQAPLTVAEKLQRDFLVQWRRVSKAPEALFFVQFEKGESYFHLHILVETTGVKSMVLGRFLSQIRDKLVQTIYRGIEPTLPNWFAVTKTRNGAGGGNKVVDECYIPNYLLPKTQPELQWAWTNMEEYISACLNLAERKRLVAQHLTHVSQTQEQNKENLNPNSDAPVIRSKTSARYMELVGWLVDRGITSEKQWIQEDQASYISFNAASNSRSQIKAALDNAGKIMALTKSAPDYLVGPAPPADIKTNRIYRILELNGYEPAYAGSVFLGWAQKRFGKRNTIWLFGPATTGKTNIAEAIAHAVPFYGCVNWTNENFPFNDCVDKMVIWWEEGKMTAKVVESAKAILGGSKVRVDQKCKSSAQIDPTPVIVTSNTNMCAVIDGNSTTFEHQQPLQDRMFKFELTRRLEHDFGKVTKQEVKEFFRWAQDHVTEVAHEFYVRKGGANKRPAPDDADKSEPKRACPSVADPSTSDAEGAPVDFADRYQNKCSRHAGMLQMLFPCKTCERMNQNFNICFTHGTRDCSECFPGVSESQPVVRKRTYRKLCAIHHLLGRAPEIACSACDLVNVDLDDCVSEQ

SEQ ID NO: 87-89 - skipped (3 entries)

SEQ ID NO: 90 - protein, 621 aa, synthetic construct
  source 1..621: note = AAV2 Rep 78
MPGFYEIVIKVPSDLDGHLPGISDSFVNWVAEKEWELPPDSDMDLNLIEQAPLTVAEKLQRDFLTEWRRVSKAPEALFFVQFEKGESYFHMHVLVETTGVKSMVLGRFLSQIREKLIQRIYRGIEPTLPNWFAVTKTRNGAGGGNKVVDECYIPNYLLPKTQPELQWAWTNMEQYLSACLNLTERKRLVAQHLTHVSQTQEQNKENQNPNSDAPVIRSKTSARYMELVGWLVDKGITSEKQWIQEDQASYISFNAASNSRSQIKAALDNAGKIMSLTKTAPDYLVGQQPVEDISSNRIYKILELNGYDPQYAASVFLGWATKKFGKRNTIWLFGPATTGKTNIAEAIAHTVPFYGCVNWTNENFPFNDCVDKMVIWWEEGKMTAKVVESAKAILGGSKVRVDQKCKSSAQIDPTPVIVTSNTNMCAVIDGNSTTFEHQQPLQDRMFKFELTRRLDHDFGKVTKQEVKDFFRWAKDHVVEVEHEFYVKKGGAKKRPAPSDADISEPKRVRESVAQPSTSDAEASINYADRYQNKCSRHVGMNLMLFPCRQCERMNQNSNICFTHGQKDCLECFPVSESQPVSVVKKAYQKLCYIHHIMGKVPDACTACDLVNVDLDDCIFEQ

SEQ ID NO: 91 - DNA, 1866 bp, synthetic construct
  source 1..1866: mol_type = other DNA; note = AAV2 Rep 78
atgccggggttttacgagattgtgattaaggtccccagcgaccttgacgggcatctgcccggcatttctgacagctttgtgaactgggtggccgagaaggaatgggagttgccgccagattctgacatggatctgaatctgattgagcaggcacccctgaccgtggccgagaagctgcagcgcgactttctgacggaatggcgccgtgtgagtaaggccccggaggcccttttctttgtgcaatttgagaagggagagagctacttccacatgcacgtgctcgtggaaaccaccggggtgaaatccatggttttgggacgtttcctgagtcagattcgcgaaaaactgattcagagaatttaccgcgggatcgagccgactttgccaaactggttcgcggtcacaaagaccagaaatggcgccggaggcgggaacaaggtggtggatgagtgctacatccccaattacttgctccccaaaacccagcctgagctccagtgggcgtggactaatatggaacagtatttaagcgcctgtttgaatctcacggagcgtaaacggttggtggcgcagcatctgacgcacgtgtcgcagacgcaggagcagaacaaagagaatcagaatcccaattctgatgcgccggtgatcagatcaaaaacttcagccaggtacatggagctggtcgggtggctcgtggacaaggggattacctcggagaagcagtggatccaggaggaccaggcctcatacatctccttcaatgcggcctccaactcgcggtcccaaatcaaggctgccttggacaatgcgggaaagattatgagcctgactaaaaccgcccccgactacctggtgggccagcagcccgtggaggacatttccagcaatcggatttataaaattttggaactaaacgggtacgatccccaatatgcggcttccgtctttctgggatgggccacgaaaaagttcggcaagaggaacaccatctggctgtttgggcctgcaactaccgggaagaccaacatcgcggaggccatagcccacactgtgcccttctacgggtgcgtaaactggaccaatgagaactttcccttcaacgactgtgtcgacaagatggtgatctggtgggaggaggggaagatgaccgccaaggtcgtggagtcggccaaagccattctcggaggaagcaaggtgcgcgtggaccagaaatgcaagtcctcggcccagatagacccgactcccgtgatcgtcacctccaacaccaacatgtgcgccgtgattgacgggaactcaacgaccttcgaacaccagcagccgttgcaagaccggatgttcaaatttgaactcacccgccgtctggatcatgactttgggaaggtcaccaagcaggaagtcaaagactttttccggtgggcaaaggatcacgtggttgaggtggagcatgaattctacgtcaaaaagggtggagccaagaaaagacccgcccccagtgacgcagatataagtgagcccaaacgggtgcgcgagtcagttgcgcagccatcgacgtcagacgcggaagcttcgatcaactacgcagacaggtaccaaaacaaatgttctcgtcacgtgggcatgaatctgatgctgtttccctgcagacaatgcgagagaatgaatcagaattcaaatatctgcttcactcacggacagaaagactgtttagagtgctttcccgtgtcagaatctcaacccgtttctgtcgtcaaaaaggcgtatcagaaactgtgctacattcatcatatcatgggaaaggtgccagacgcttgcactgcctgcgatctggtcaatgtggatttggatgactgcatctttgaacaataa

SEQ ID NO: 92 - protein, 536 aa, synthetic construct
  source 1..536: note = AAV2 Rep 68
MPGFYEIVIKVPSDLDGHLPGISDSFVNWVAEKEWELPPDSDMDLNLIEQAPLTVAEKLQRDFLTEWRRVSKAPEALFFVQFEKGESYFHMHVLVETTGVKSMVLGRFLSQIREKLIQRIYRGIEPTLPNWFAVTKTRNGAGGGNKVVDECYIPNYLLPKTQPELQWAWTNMEQYLSACLNLTERKRLVAQHLTHVSQTQEQNKENQNPNSDAPVIRSKTSARYMELVGWLVDKGITSEKQWIQEDQASYISFNAASNSRSQIKAALDNAGKIMSLTKTAPDYLVGQQPVEDISSNRIYKILELNGYDPQYAASVFLGWATKKFGKRNTIWLFGPATTGKTNIAEAIAHTVPFYGCVNWTNENFPFNDCVDKMVIWWEEGKMTAKVVESAKAILGGSKVRVDQKCKSSAQIDPTPVIVTSNTNMCAVIDGNSTTFEHQQPLQDRMFKFELTRRLDHDFGKVTKQEVKDFFRWAKDHVVEVEHEFYVKKGGAKKRPAPSDADISEPKRVRESVAQPSTSDAEASINYADRLARGHSL

SEQ ID NO: 93 - skipped

SEQ ID NO: 94 - protein, 624 aa, synthetic construct
  source 1..624: note = AAV3 Rep 78
MPGFYEIVLKVPSDLDERLPGISNSFVNWVAEKEWDVPPDSDMDPNLIEQAPLTVAEKLQREFLVEWRRVSKAPEALFFVQFEKGETYFHLHVLIETIGVKSMVVGRYVSQIKEKLVTRIYRGVEPQLPNWFAVTKTRNGAGGGNKVVDDCYIPNYLLPKTQPELQWAWTNMDQYLSACLNLAERKRLVAQHLTHVSQTQEQNKENQNPNSDAPVIRSKTSARYMELVGWLVDRGITSEKQWIQEDQASYISFNAASNSRSQIKAALDNASKIMSLTKTAPDYLVGSNPPEDITKNRIYQILELNGYDPQYAASVFLGWAQKKFGKRNTIWLFGPATTGKTNIAEAIAHAVPFYGCVNWTNENFPFNDCVDKMVIWWEEGKMTAKVVESAKAILGGSKVRVDQKCKSSAQIEPTPVIVTSNTNMCAVIDGNSTTFEHQQPLQDRMFEFELTRRLDHDFGKVTKQEVKDFFRWASDHVTDVAHEFYVRKGGAKKRPASNDADVSEPKRECTSLAQPTTSDAEAPADYADRYQNKCSRHVGMNLMLFPCKTCERMNQISNVCFTHGQRDCGECFPGMSESQPVSVVKKKTYQKLCPIHHILGRAPEIACSACDLANVDLDDCVSEQ

SEQ ID NO: 95-97 - skipped (3 entries)

SEQ ID NO: 98 - protein, 624 aa, synthetic construct
  source 1..624: note = AAV3B Rep 78
MPGFYEIVLKVPSDLDEHLPGISNSFVNWVAEKEWELPPDSDMDPNLIEQAPLTVAEKLQREFLVEWRRVSKAPEALFFVQFEKGETYFHLHVLIETIGVKSMVVGRYVSQIKEKLVTRIYRGVEPQLPNWFAVTKTRNGAGGGNKVVDDCYIPNYLLPKTQPELQWAWTNMDQYLSACLNLAERKRLVAQHLTHVSQTQEQNKENQNPNSDAPVIRSKTSARYMELVGWLVDRGITSEKQWIQEDQASYISFNAASNSRSQIKAALDNASKIMSLTKTAPDYLVGSNPPEDITKNRIYQILELNGYDPQYAASVFLGWAQKKFGKRNTIWLFGPATTGKTNIAEAIAHAVPFYGCVNWTNENFPFNDCVDKMVIWWEEGKMTAKVVESAKAILGGSKVRVDQKCKSSAQIEPTPVIVTSNTNMCAVIDGNSTTFEHQQPLQDRMFKFELTRRLDHDFGKVTKQEVKDFFRWASDHVTDVAHEFYVRKGGAKKRPASNDADVSEPKRQCTSLAQPTTSDAEAPADYADRYQNKCSRHVGMNLMLFPCKTCERMNQISNVCFTHGQRDCGECFPGMSESQPVSVVKKKTYQKLCPIHHILGRAPEIACSACDLANVDLDDCVSEQ

SEQ ID NO: 99-101 - skipped (3 entries)

SEQ ID NO: 102 - protein, 623 aa, synthetic construct
  source 1..623: note = AAV4 Rep 78
MPGFYEIVLKVPSDLDEHLPGISDSFVSWVAEKEWELPPDSDMDLNLIEQAPLTVAEKLQREFLVEWRRVSKAPEALFFVQFEKGDSYFHLHILVETVGVKSMVVGRYVSQIKEKLVTRIYRGVEPQLPNWFAVTKTRNGAGGGNKVVDDCYIPNYLLPKTQPELQWAWTNMDQYISACLNLAERKRLVAQHLTHVSQTQEQNKENQNPNSDAPVIRSKTSARYMELVGWLVDRGITSEKQWIQEDQASYISFNAASNSRSQIKAALDNASKIMSLTKTAPDYLVGQNPPEDISSNRIYRILEMNGYDPQYAASVFLGWAQKKFGKRNTIWLFGPATTGKTNIAEAIAHAVPFYGCVNWTNENFPFNDCVDKMVIWWEEGKMTAKVVESAKAILGGSKVRVDQKCKSSAQIDPTPVIVTSNTNMCAVIDGNSTTFEHQQPLQDRMFKFELTKRLEHDFGKVTKQEVKDFFRWASDHVTEVTHEFYVRKGGARKRPAPNDADISEPKRACPSVAQPSTSDAEAPVDYADRYQNKCSRHVGMNLMLFPCRQCERMNQNVDICFTHGVMDCAECFPVSESQPVSVVRKRTYQKLCPIHHIMGRAPEVACSACELANVDLDDCDMEQ

SEQ ID NO: 103-109 - skipped (7 entries)

SEQ ID NO: 110 - protein, 623 aa, synthetic construct
  source 1..623: note = AAV6 Rep 78
MPGFYEIVIKVPSDLDEHLPGISDSFVNWVAEKEWELPPDSDMDLNLIEQAPLTVAEKLQRDFLVQWRRVSKAPEALFFVQFEKGESYFHLHILVETTGVKSMVLGRFLSQIRDKLVQTIYRGIEPTLPNWFAVTKTRNGAGGGNKVVDECYIPNYLLPKTQPELQWAWTNMEEYISACLNLAERKRLVAHDLTHVSQTQEQNKENLNPNSDAPVIRSKTSARYMELVGWLVDRGITSEKQWIQEDQASYISFNAASNSRSQIKAALDNAGKIMALTKSAPDYLVGPAPPADIKTNRIYRILELNGYDPAYAGSVFLGWAQKRFGKRNTIWLFGPATTGKTNIAEAIAHAVPFYGCVNWTNENFPFNDCVDKMVIWWEEGKMTAKVVESAKAILGGSKVRVDQKCKSSAQIDPTPVIVTSNTNMCAVIDGNSTTFEHQQPLQDRMFKFELTRRLEHDFGKVTKQEVKEFFRWAQDHVTEVAHEFYVRKGGANKRPAPDDADKSEPKRACPSVADPSTSDAEGAPVDFADRYQNKCSRHAGMLQMLFPCKTCERMNQNFNICFTHGTRDCSECFPGVSESQPVVRKRTYRKLCAIHHLLGRAPEIACSACDLVNVDLDDCVSEQ

SEQ ID NO: 111-113 - skipped (3 entries)

SEQ ID NO: 114 - protein, 623 aa, synthetic construct
  source 1..623: note = AAV7 Rep 78
MPGFYEIVIKVPSDLDEHLPGISDSFVNWVAEKEWELPPDSDMDLNLIEQAPLTVAEKLQRDFLVQWRRVSKAPEALFFVQFEKGESYFHLHVLVETTGVKSMVLGRFLSQIREKLVQTIYRGVEPTLPNWFAVTKTRNGAGGGNKVVDECYIPNYLLPKTQPELQWAWTNMEEYISACLNLAERKRLVAQHLTHVSQTQEQNKENLNPNSDAPVIRSKTSARYMELVGWLVDRGITSEKQWIQEDQASYISFNAASNSRSQIKAALDNAGKIMALTKSAPDYLVGPSLPADIKTNRIYRILELNGYDPAYAGSVFLGWAQKKFGKRNTIWLFGPATTGKTNIAEAIAHAVPFYGCVNWTNENFPFNDCVDKMVIWWEEGKMTAKVVESAKAILGGSKVRVDQKCKSSAQIDPTPVIVTSNTNMCAVIDGNSTTFEHQQPLQDRMFKFELTRRLEHDFGKVTKQEVKEFFRWASDHVTEVAHEFYVRKGGASKRPAPDDADISEPKRACPSVADPSTSDAEGAPVDFADRYQNKCSRHAGMIQMLFPCKTCERMNQNFNICFTHGVRDCLECFPGVSESQPVVRKKTYRKLCAIHHLLGRAPEIACSACDLVNVDLDDCVSEQ

SEQ ID NO: 115-117 - skipped (3 entries)

SEQ ID NO: 118 - protein, 625 aa, synthetic construct
  source 1..625: note = AAV8 Rep 78
MPGFYEIVIKVPSDLDEHLPGISDSFVNWVAEKEWELPPDSDMDRNLIEQAPLTVAEKLQRDFLVQWRRVSKAPEALFFVQFEKGESYFHLHVLVETTGVKSMVLGRFLSQIREKLGPDHLPAGSSPTLPNWFAVTKDAVMAPAGGNKVVDECYIPNYLLPKTQPELQWAWTNMEEYISACLNLAERKRLVAQHLTHVSQTQEQNKENLNPNSDAPVIRSKTSARYMELVGWLVDRGITSEKQWIQEDQASYISFNAASNSRSQIKAALDNAGKIMALTKSAPDYLVGPSLPADITQNRIYRILALNGYDPAYAGSVFLGWAQKKFGKRNTIWLFGPATTGKTNIAEAIAHAVPFYGCVNWTNENFPFNDCVDKMVIWWEEGKMTAKVVESAKAILGGSKVRVDQKCKSSAQIDPTPVIVTSNTNMCAVIDGNSTTFEHQQPLQDRMFKFELTRRLEHDFGKVTKQEVKEFFRWASDHVTEVAHEFYVRKGGASKRPAPDDADKSEPKRACPSVADPSTSDAEGAPVDFADRYQNKCSRHAGMLQMLFPCKTCERMNQNFNICFTHGVRDCSECFPGVSESQPVVRKRTYRKLCAIHHLLGRAPEIACSACDLVNVDLDDCVSEQ

SEQ ID NO: 119-125 - skipped (7 entries)

SEQ ID NO: 126 - protein, 622 aa, synthetic construct
  source 1..622: note = AAV10 Rep 78
MPGFYEIVIKVPSDLDEHLPGISDSFVNWVAEKEWELPPDSDMDRNLIEQAPLTVAEKLQRDFLVHWRRVSKAPEALFFVQFEKGESYFHLHVLVETTGVKSMVLGRFLSQIRDRLVQTIYRGVEPTLPNWFAVTKTRNGAGGGNKVVDECYIPNYLLPKTQPELQWAWTNMEEYISACLNLAERKRLVAQHLTHVSQTQEQNKENLNPNSDAPVIRSKTSARYMELVGWLVDRGITSEKQWIQEDQASYISFNAASNSRSQIKAALDNAGKIMALTKSAPDYLVGPSLPADIKANRIYRILELNGYDPAYAGSVFLGWAQKKFGKRNTIWLFGPATTGKTNIAEAIAHAVPFYGCVNWTNENFPFNDCVDKMVIWWEEGKMTAKVVESAKAILGGSKVRVDQKCKSSAQIDPTPVIVTSNTNMCAVIDGNSTTFEHQQPLQDRMFKFELTRRLEHDFGKVTKQEVKEFFRWAQDHVTEVTHEFYVRKGGATKRPAPSDADISEPKRACPSVAEPSTSDAEAPVDFADRYQNKCSRHAGMLQMLFPCKTCERMNQNFNVCFTHGVRDCSECFPGASESQPVVRKKTYQKLCAIHHLLGRAPEIACSACDLVNVDLDDCVSEQ

SEQ ID NO: 127-129 - skipped (3 entries)

SEQ ID NO: 130 - protein, 622 aa, synthetic construct
  source 1..622: note = AAV11 Rep 78
MPGFYEIVIKVPSDLDEHLPGISDSFVNWVAEKEWELPPDSDMDRNLIEQAPLTVAEKLQRDFLVHWRRVSKAPEALFFVQFEKGESYFHLHVLVETTGVKSMVLGRFLSQIRDRLVQTIYRGVEPTLPNWFAVTKTRNGAGGGNKVVDECYIPNYLLPKTQPELQWAWTNMEEYISACLNLAERKRLVAQHLTHVSQTQEQNKENLNPNSDAPVIRSKTSARYMELVGWLVDRGITSEKQWIQEDQASYISFNAASNSRSQIKAALDNAGKIMALTKSAPDYLVGPSLPADIKANRIYRILELNGYDPAYAGSVFLGWAQKKFGKRNTIWLFGPATTGKTNIAEAIAHAVPFYGCVNWTNENFPFNDCVDKMVIWWEEGKMTAKVVESAKAILGGSKVRVDQKCKSSAQIDPTPVIVTSNTNMCAVIDGNSTTFEHQQPLQDRMFKFELTRRLEHDFGKVTKQEVKEFFRWAQDHVTEVAHEFYVRKGGATKRPAPSDADISEPKRACPSVPEPSTSDAEAPVDFADRYQNKCSRHAGMLQMLFPCKTCERMNQNFNVCFTHGVRDCSECFPGASESQPVVRKKTYQKLCAIHHLLGRAPEIACSACDLVNVDLDDCVSEQ

SEQ ID NO: 131-133 - skipped (3 entries)

SEQ ID NO: 134 - protein, 621 aa, synthetic construct
  source 1..621: note = AAV12 Rep 78
MPGFYEVVIKVPSDLDEHLPGISDSFVNWVAEKEWELPPDSDMDQNLIEQAPLTVAEKLQREFLVEWRRVSKFLEAKFFVQFEKGDSYFHLHILIEITGVKSMVVGRYVSQIRDKLIQRIYRGVEPQLPNWFAVTKTRNGAGGGNKVVDECYIPNYLLPKVQPELQWAWTNMEEYISACLNLAERKRLVAQHLTHVSQTQEGDKENLNPNSDAPVIRSKTSARYMELVGWLVDKGITSEKQWIQEDQASYISFNAASNSRSQIKAALDNASKIMSLTKTAPDYLIGQQPVGDITTNRIYKILELNGYDPQYAASVFLGWAQKKFGKRNTIWLFGPATTGKTNIAEAIAHAVPFYGCVNWTNENFPFNDCVDKMVIWWEEGKMTAKVVESAKAILGGSKVRVDQKCKASAQIDPTPVIVTSNTNMCAVIDGNSTTFEHQQPLQDRMFKFELTRRLDHDFGKVTKQEVKDFFRWAADHVTDVAHEFYVTKGGAKKRPAPSDEDISEPKRPRVSFAQPETSDAEAPGDFADRYQNKCSRHAGMLQMLFPCKTCERMNQNSNVCFTHGQKDCGECFPGSESQPVSVVRKTYQKLCILHQLRGAPEIACSACDQLNPDLDDCQFEQ

SEQ ID NO: 135-137 - skipped (3 entries)

SEQ ID NO: 138 - protein, 623 aa, synthetic construct
  source 1..623: note = AAV13 Rep 78
MPGFYEIVLKVPSDLDEHLPGISDSFVNWVAEKEWELPPDSDMDLNLIEQAPLTVAEKLQREFLVEWRRVSKAPEALFFVQFEKGDSYFHLHILVETVGVKSMVVGRYVSQIKEKLVTRIYRGVEPQLPNWFAVTKTRNGAGGGNKVVDDCYIPNYLLPKTQPELQWAWTNMDQYLSACLNLAERKRLVAQHLTHVSQTQEQNKENQNPNSDAPVIRSKTSARYMELVGWLVDRGITSEKQWIQEDQASYISFNAASNSRSQIKAALDNASKFMSLTKTAPDYLVGNNPPEDITSNRIYKILEMNGYDPQYAASVFLGWAQKKFGKRNTIWLFGPATTGKTNIAEAIAHAVPFYGCVNWTNENFPFNDCVDKMVIWWEEGKMTAKVVESAKAILGGSKVRVDQKCKSSAQIDPTPVIVTSNTNMCAVIDGNSTTFEHQQPLQDRMFKFELTKRLEHDFGKVTKQEVKDFFRWASDHVTEVSHEFYVRKGGARKRPAPNDADISEPKRACPSVAQPSTSDAEAPVDYADRYQNKCSRHVGMNLMLFPCRQCERMNQNVDICFTHGVMDCAECFPVSESQPVSVVRKRTYQKLCPIHHIMGRAPEVACSACDLANVDLDDCDMEQ

SEQ ID NO: 139-141 - skipped (3 entries)

SEQ ID NO: 142 - DNA, 5234 bp, Acheta domestica densovirus
  source 1..5234: mol_type = genomic DNA; note = Acheta domestica densovirus genome - NC_004290
ttatatccttaggatataaagagcaagcacccaggcacttcttctattctgcctcagatcgtcgatataagcggagcttttctgtgactgtacgtagtgtattgatcttcgtgttctggaactcaggtatgttgttcgctgcagtagaagcgcctccagcatgtacgttcgaacctcgttcattgcaacagttatcacttagaacttttgtagaaaatacggattgggacgtaataaattttctctataaaaataatgaattttctagcaggttgtattcatcgatgttttatgaaagaaaatatctggataatccgcatgaatatcatgattggtcagtaccaaataatgttcccattgaaacgtacataaagataatgaattatcacatggaagacggtattccatcatttgctttccaacgcaatttagtgaatagatgtttcatacaagtgcatttctgtgctcctggtacttttggcttccctattacagataatatttgtataccttgttataatacatttgcgaggtttaacagctctaatttctatcggtttaagaagtttgttctcgttcgcgatcaaacagttattgaagatgatgaacttatcgattatatgcaatgtagaagtaattggtgtacttgttgtaatacaacatcattatttgcgattaaagatggaactcatttaggcccgcagtggtttaatagtatatatctcatgtgtaacgaaattccgttattacctgttgcagatgataactgagttaaacgatggagccagtacaagcacaggacaatctggatggagtagaggagacgttgaaggactttatgaagacattatggggcctctgcgagaatcaaccgttgaccaatccgcaatggtgggcggacatgctggagagtgttaccatttctctggaggatcagaacacgaacctagcctcagattacgcacaattaaagaaaagcttcctgaagattatatcgcactggcagacaatgtcaacgaaatggttggtcacttcattcgcggacttagatcgaagagtttcagctctactcggcggtacatttcagacgttgtggtcacgtcgtctcctgaacacggtcgcagagtgctggacttccttaataagtgcgcaagcacttaccccggaagactactactctgggtcaacgaaggagaccacatccacgtcgtccacgactgcccgtacagcgctggacaatgtagatgcaagttctcaaaaacggaagacttcaaaaagggacttcgcaagcctctacgcaagtcgaagttcattaccgaactcgatgacaccgactgggcaaatgttttcttatacttcattgtgtcaaaatggaaaagcgaacgagcagtttggattgatggagccttacgacgactaccggatacaggtgaaggtgtacgatggaccgcgctgtgcgagcaatcccgactactactggaacaacaagctgcaagagatggatgtgacggtatcgaagaagtcacagatttggaaggacatcaacaacgcgttttgcgtggcgtataccaacctcgaagaaaacggagcaagttccagaccttcgccgaagaagcaaaagtactattctcaaaattgaactgtattcctgtgcgtgacgctagaataataattgataggaagcatcctatgtattttgaattgcatgatccaaaaaatgaaaagttgtatactgctgctatttctttatatgtgcgtgacattaatgaaatgtctttgaatgatttctacttacagactttagagaatacatgtgtttatcaagctggtaatatagacccttttgttttttatcataatatggaagatagtgttcactttcttaatgaacttatcttatttcaatgtaatggtagtgaggaaggtgtgaaagaattactaatgaatattgtagcttggtttaataggttaggttggtatatgccaacaattaatatgaatggggaaaaagaatatcagcttaaccctaaagttaatactgtatgtataattggtaatcataattgtggtaagaattatttttgggacgcagtttgctgtttgggtttaaatgtgggttttcttggtagagttaataataaaactaacaagtttgctttgcaagattgtgttcacaaacgaattgtaattggtaatgaaatatctttggaagatggagcaaaggaggatatgaagaaattatgtgaggggtgtccattcaatgttagcgtaaaacatcaatcagatggaattgttgccaggacacctgtttgcttaattagtaacaattgtatacctattgcatgtgatgctcattttgtagatgtaaggatgaaggtattttattggaggccatgtagttatttggccaaatcaaggaagaagccgtatccaccggctgtttttgaattaatgaaaatgtatggagttgattggaataaagtttattaattccttttattacatctttcatttttgttgcaatcccataatagtactcttcccaactgcatgagtgtactccaaagtagaactggaataaatctggttatcaggaatagtattaggaccgttaaaaagaggtctaatggaaggatattgaagtcgtactttgcaagcagcttcaacaataaagtaagcttgagtgtcagtaaaattagcattattaagattatcatctaaattagctgttgtcaatgcatgaacaggtttcacaccaatatgcaaactaggttgagcttttggtgtataagatggaaaagctcctgcatgaagtatttgacttttttcaatttgagtcgcaatagtccattcagtatttgatactacagtatcattaaatttttctgaatcccctcttaaaatattattagtcatagtgaaatcagcagttcgatactgcgagttccctgtacctgctgggcaactaagagttgagttaccacccactgcgctaggtacaccagtatatacagctggtatagcttttttaattaaacccaattgtggtttataattatattcaacaatttctcctggaggtccattacatctaatttcatttacatgagattgtaaacattcgtaacccggattatctgccgtaccgttctgttgaagaacaagtgcgaaataattctttaatggatacggaataccgaactgatgacgtggtacatgattgggtactgatttatcgccgtaaaactctttaacataatcctcaaaaagattttcatcacgtattgctccaagttcatctatggatgatacaaccattggttcattagcttgaaattctttaggacgtacgtcaataccttgtgtttttatattcaggcctgtagcatgaagaataaattgattttgatttagagtagcaagaccagtattagaactatttgtttgaaaagcaatacgaggggtaaatgctgttacgcgtacattacattcttcaatgcaacttccaggtggtaattgagcaaattcatttggattcatatacaagaacggtcggtcgactggtaaacgtcccaaactagtaataacgaagttgtcaacatatgtaacatcgttaactgtccttgttattggaattacaacatttgcaagaccataagttaaaaatcgatgtactttgttaaagataatgaaattgttatgcggagtagtaattggtctaggaattggaataatcgcttgaccgcctccttcacctgcaatatctgcacctgctcccggtaatgatgtacctgccattcttgaacgtttaccaccactacttttaggaggacgaccaccaccgccgcgtttgccctttcccttgtcttgtgttttgtccggggttatgggaggagttaaaggagcactcatggacgaagaatcaccttcgtcaggtggagtactatctacaggattacttacaggttcaggatctggatctgtggaacgtccaggttgcgctgctaaatcagtagtcggatgatgttcctgtgtagtagaaggaagttgatctacgtcgaagtcgtcaatgtcttccggattaccttcaggtagctcgtctaatatatcatctgcagttggagttgcaggtgcgacttcttcttcttctgcacgaggaggttctggaataggatgatcaattggtaaacctcgacgtactcgagctaattgccattgttcaacagcgtaccgccgttgaccttcatttaagtattcccaattatcacgttcttgtggatgaggtttcagtgggggtgtcattacactgaaaacaaaataaaaagtatcagtactcacgttttttaggttgttgaggatatacaggtccaccaattacgtcttcaattacacgtttagctttaagtccgtattttccaacaaatgcttgccacgtaccggatttctggtattcctcagaaaaacgatgaattgcttcgtcgtccaatttatatacttcagttttgaaatcttcttcagtaaaatactgtgattttgcacgatgcaataagtcttcgtacccaagatcgtgttccttagcaatttgatcagtttctgatcgtgcaggtttaggatctattggattaccaggccccacgaaatcagtgccaggtaatactgcacctttgctactcgtgtgatcaattaattttttaattccgatgccgattcctgcgagggctgctcctcctgctgcagttgccgcgacagttccaagagttccagctgtgcctgctgctgcgctacctgcagtagcgcctcccaaaagtcctgttgtttcggtagctgcttcgccgagttcaagtgctgtttcctcaactccagtagagaaacttgtttcagcttcggctgctccttcacctgcgttgatttcgtcttccgcgatatcaatgcgagtttcttctggccctgccgcctcttggaaactagtttcgcgaagaggttctggttcatttgtaggtagtctgtcgtaggggtgactacgattccaccatctcccaaatctattacgaagtttaggtgtatttgctaaaggtaaattattagtacctaaactgaaatcacgcaacgtgagatctgtaaagacgccagacatttaatactacgatgctaaaacttccgcttatataccttctgacgtcagcgaaatagaagaagtgcctgggtgcttgctctttatatccttcggatataaa

SEQ ID NO: 143 - DNA, 4945 bp, Acheta domestica mini ambidensovirus
  source 1..4945: mol_type = genomic DNA; note = Acheta domestica mini ambidensovirus - NC_022564
tcccacttctgagccccggcgcagtgcccgctcgtgacccccgccctgcgcgtagcgcgccttcggcaggcgggggtcacgagcgggcactgcgccggggctcagaagtgggatgctggcacgtacttttgttgttactatgcacgtgacaaggtcatgacgtcagagcacagggaaggggtactgtagaggtatataagcgctgctgggtctggttcgtcgtcagttttgtggttgcttttaatgagtgaatagatagatgtgaattgatagatagacattatgagtgtgagttttcgtgttccatcacttttaagcctaactagtgcacgtgtagttcatttaatagatagatatgattatattaacaaattagaacttcctggagaattaatctctttattgcagtcgcagttcatgacacacttattcacttgtgatgaaaatatggataatgtgcgtaaccgttctcgtattatttgtaaacatagattattaccaagacgtaatattcttggtatttgtaatttgaatcgtttatgttgtcatttactggttagttgcatagtaaatttaccttattctgtgtttgccgatagtgttatacatgaaactaaggcaatcgcttctttaactacacgttttattattcatttacgatattttcaagtaaaatatactgttcctgtgaatgattctcttgtattctttcaacgcttttgttttgaatgctggtatcatgatggaattcgtgataaatttacaagtatcgaaagccaatccattaagagttgtttatatatcagtttgcaaatgatttatactcaatatatcacagatttgagtatgtggtgtcataactgcagagtgtgtcctttattttcttttgttaataccacatgtacaacacattgtataccattgtgtcgtaaacgtttgcatttctaattgtagatcagtgaagtcgattctgaagggtcagtaatagcctctgatgacgaggttaaagaagaacaaaaagtatccatatctgcattgctgttgaaattgtttgtctacattaggaatttgcatattcccattaacaatacaaaaattatctttgaagtattcttaaattggaaaccatcatctcttgaagaggacctcttgggttggaagaacgttgatacagaatgtcttcaagtagcgaagaagatgatatgccaacaaatgtcagtagtgttcaaacgagcaaaatcgatcagtacgtgggcctcattaaacaaagtattagaaaaagtttcttgctccacgatatcgttgtcggaaccgaccgtgcaagtgttggagaactctttcaaatacttcatcaacgacttcatcaacgaacaaaaggatttggactcatctatctccacgcaaaacaaggatttgaacatatccacgttgtccacgactgccactacgccaattactgctgtaagtgcaccttgcgacaatccatccctggaggatccagatgccgtgcaagtacaagaccaacatgtggccttggaaacgaatactactacaatctcttgttctatttctacaagaaacaaaaggggacgttgtacttacaagtgggtccctcccaaattgaaatccagtgtaatgaagctacaattatttccgacgcgcgactgccagcacaatcaacctcgggattggtggaggaagagtttgaaacaagtgacaacgacagtaacatatccatttgtaacatccccagtgatgaatacggcggaatatcatctccaacaactattactagcgtgttcccgggaacgtcaagacatgcaagagcaagagaaggtaacaaaattagtagagctggacaattaatccattttttgttaaataatgtttactctcccttggatttaattaaacaaagtaatgaatggtatacttctccttttgctacttgtaaagaagatacctttgctactggtgtagaaggagctcatactttcttaaaaagtttaagtgtttctgaaatggaaaattttgtaaaaggaaatcatattcagtataagaacaatatagtacgttacagttgtattgctggtagaatgagtgaattttattatactgtagatgaaagccttgatataattgaacaattattaatgtatcaatttgacgaaaattttgagagtgtatctgattttattcaccagttatattatgttcttaataagcaaaatgggaaaaaaaattgtattgaattaattggacctccttctagttataagtctacttttttgcattgggtggcggaagcttttattgctgtgggaattattaatattgttaacaaaacagcaccatttggttttgctcctgctgttaataaacgagtacttattattgatgattataatttcagttcagaatatcatgaaactttactgaatatattatcaggaacaacttgcaatgttaatgtaaaatacaaaacaaatggttatgtaactcacacgcctgtattaatggcaagtaattataagacatttactagtactcggtttgaacatcgtatggtaacattttattggaaggaatataaggtattattaaaaaagcatttatatccattagctgtatttgctttattcaataaatatataattgaatagttacaatgtttgttttaatgtatttaatacataaggattacctctatcttttttcctttctcctttatttttactagaaaggtcagtacctgttgatgtaggtctttcatgagatgttaaattccattggctatatgaagcataataaaaatctgttgtaggacggccatcatatcctttttctttgagttgaggtctaacattagcatatggaaacaatgaatttcctgtagtttcttcaactatacaaaatgtctgaaatttaacatacatacaaacattaactggatttgtacttgtagaatatcctggagtattaggatatactggcataatacctaaatgaactgatggctgtactttgctcatatggggatgctggtttaatgatgaatgacaactagttttttcaataattgttctataaagagaattaagtaaagtttgatttcgtgctcgattactagtttcattaatattaacagtatgagaattaatattgtgaacataattaccatttgcatcaacgttaaaatcaatattattacatgttgataaagtaccaccatggtatgtttcgttaagtgattttacatcatcacttccttgtacagggctaaagaaaagcgtcccatcctgaggagaataaacttccgataatattactttgtcaaccatgggagctgccgaaaaatctgtaatatccttacgaacatcaactcgtccccacgatggtaattgaaattgctgtacattaggaacagctaaatctgttttatcaccataacctaaaatttcagtataacaaggcaaatctctaggacatttttgaatacatggataacctccagcttcagtttgaagagcattactaccccaaagtatatcttcaagttctgatccaaagtattcattcgatttagttactcttaatgaattagccgcatattctggtattcgtggtctaatatggaatttattatttaaacctactgcttttaatccctgaatccaatgatgtgaagaagcaataccagttaaagccgaattagtttcaaacgatgtagtaaagccacgtatggttgcacgaatgcctactttcacaatacgagcatcaggtgctaaacttagaaattcagctggtgacatatacattgaaacctgctcccatggtatgtatcctaaagaaaacaaacgagcagtattagcacgtactggcgatgtgcctgcagttgaaattgtatcacaaaatgaattaccccataattgccaagtgaaatcattataaaacactttacgtcgggcaggagtaaagggagttttatataatgttatatcatgggtttctgctctaggtaattgtccactagtacctggagttacacctcctgttcgagctgtagcagaaccaatatcttgatccgcaagatcttcatccatattttcccattcttcttcgttgttcatattttctgctgcgtctacttcgtccaatattctatttaaatcgttgtcgattaaatcaaaggcttggaagtgatcttgttgttggttggtagacggtggtcgttctactgagggtcccggttccggatttgatgatggttcgtgggaggcttcttgccggtctcccgctgcttccgctgctaatctgagacgtttcagacgattcgcttgattgattttcctgatgcgtgcccaatccttcggtgttgttactcgcaaccgtttttgcggcgtcttcaccgacgatgatggcgtactcatctgaggatactggacacccacaacagattctgcaacatactttgcacccaaacctgcagcaccaacaagattgtctatttctcctgttttctgccagttctgccaaaattcgcgtatagcattaaaatcactatttctcacttcactcgctgttctatcaaaattataaaaccaatcgtgtctttgagctattttatccgcactattcactggtttaccactatgtaatttatttccaggacctaaatatttatgtcctggaacaactagtaccggcgccatccacgaaataacgaggcaaggctatcttatccctttatatacctctacagtaccccttccctgtgctctgacgtcatgaccttgtcacgtgcatagtaacaacaaaagtacgtgccagcatcccacttctgagccccggcgcagtgcccgctcgtgacccccgcctgccgaaggcgcgctacgcgcagggcgggggtcacgagcgggcactgcgccggggctcagaagtggga

SEQ ID NO: 144 - DNA, 6110 bp, Ambidensovirus Croatia 17 S17
  source 1..6110: mol_type = genomic DNA; note = Ambidensovirus_Croatia_17_S17 - NC_077029
ttttgtccagcccttggatttactagtctccagtgtctacggaattgagcctttgtttccttagtccagggaacgttgtatggtttaatatatttctgtctatctgctaaaggcaagcgtcgaagttcaaatggaactgacgcgtaataagcgtctctgtctttaaataatcctaatggattaccggtagctgcagctctccctaattgactctggaagatagcgtcgtactgcgaccctgctgcacctgctgctcctgttggtcttaggggtagtttcgacgctccgtaccctgggtgaactctgctccggttgaggagggatgtccgttcagttggttgttgaaataaagtctctgtagaggtactcgctgaactactcccactgttgaatccgtcgaggacaatgtactcgcccatactgacgcgctcggccttcctcccctccttttattctctttgtccgccatttaatctcctttactgggtgcttgcccctaagcccctggcttagcactaacgacgaccacgacgacgggtggggttatatactcgctgaccttgataaccatggtttaccgataatagcaaattatcatggtaaccggttatcaaggtcagcgagtatataaccccacccgtcgtcgtggtcgtcgttagtgctaagccaggggcttaggggcaagcacccagtttgaagagataataacctcggtgagtataaatactgttactatgttggattttatattagttgttgttagaaagtgctagaggagttgctgattattctttctcttggtaagtagatatggatcgggttcgagttctgcctaagtggatgactacctttaatcctaaatcgttgcggtctctggcgatgaatgctgttcagagggtctacaagcatgactggcatcttgttcgcgaaattccaaagtctttgcaggaggagttactagaggcttggttgcagtgtgaagaaagtgttccagtgtctgatgatgatttagagaaagtagaggctgttgtttgtaggggttggaaaggaatgcgtccatggtctccacaagtgtttgtgtatattatgatgttaccgaatgaactgccttgttttgcttttgaggataatcatgtaatttttgagtattatctttggaaacgacagaactgtgaaatgaacttatgtgttccatgtttcatctctgttagtaaagaatataaacaatattctgctaattactggttagataagggatggcaattctataaagtgaaaaatcacattcgtgtaaaaggagatgggttgttgtatgttttgtgggatagatcatcttggtgcgatcgatgcatttgtgaacctttgatttatgatattattgattatgaggactgttactacgactatcattaccacaagaagaggcgttgcacgcggtgttacgattcaagcagtgactctgattcggacacagactggcaaactcgttctttggttggtggtcggagaacagatcctaaaatgtatgaaatgatgaaacaaaataaacactttgaatggtattgtttgttttatttctagatgaataatgacctctacctttgggcaaatcctggagcaagtttgggaggcactcccggacgaatgggcgagtcatcctggtttctggatccgaatgttgcaggagatgccgttggagttgatgttcaagacgaagctgcagcaattgatcaaccgttggagcaggaactacagtcaatggtcgataggttcgtttcccgcattgaaaaagaaaattgggaagacagcggatattacgtgtcagatgtttatgcctgcgaatcagtctcaagagctgctggactggctaaaaaattggcagaaagagctcgagatttcagaagaggatttatcggaattgctctccatggcaatcacgtccactccatccacagctgtgcatattcaaacaaatgctgcaggtgcagcttcaaagatttcccggaagcgaaagaagacattagacgacttcttcgaaagcctccacccatcgaaacgttcaagcgaagcgattgggaaaatatcacaaagtatttttgtacgaaagggcgacgagcaacgttctttaaaatcaacggtgtcgtacaaagacttcctcttgaaattacaaatatatccgacattatcctatcaggccaagttgaaggaagaccatacgcaagcttggaggactgcaacgacccgcttgacagtaacgctgaacgaaaacgaggaattgcaccgaaaggtgatggaagtactggaagtcgcaaaagacgaggtgttagcaacacaggaggaccaggaggaatcagaggggtccctggagtaattctcagcattattgagaggtatgcagtatgtcccttatctgaaattgtttatactagagagtatcttgaaaatcaaattgctactaaacgattagatgatagggatgtaaagaatgcaattgattgtcatgcagggattattaatacgtggactagagaggactttgttaaattttatactaatcctgaaactgtaaagatttggtctgcacgtagccttgacttagttgatttgtactacttgtcatatgaggaatctcagcaagttattttgcaattacttcagtatcagtgtggagataactatccacaatttgttagagacttgttaaatgttgttgacatgaaaataccaaaatgtaattgttttcttatagtgagccctccgagcgcaggaaagaacttcttaatagatgccgtaaaagactattttcttaatgtaggccagatgcaaaatcccaacaagtataacacctttgcatatcaagattgtcacaacagaagactgcttatttggaatgagcctaactatgaaccgagggaaactgagaacttaaagatgttgtttggaggagataacttgtctgctaatgttaaatgtaaaccacaagctaatgttaaaagaacacctgttatatgtatgagtaatgtaactcctagatttgctaatcatgatgcttttgtagacagagttattaaatactattggaattctgcaccttttcttaaacatgtaaataagaaaccaagaccagatgctgtaatggatttgctttattcaataaatggtgaatgaacatggtatacatctttcatttatgcaacagttggcaataccttcatccttccatactcattaggccaatcgtatgtcttagctataggacgattattagtactgaaatattgcaattgtcccttcgtattctgactaaagcaattgtctttaatatatgcatatggatcagcagattcagttacaagcacacattcaacttcaaagtatccctgagcatctaaccaagattcagcttgagtagtgttgtcatgtgtagtaagcttcggtacagctctaatgccaatattgcaagaaggcatttggctatccccaaaagattgggtatgtatttcttcgaacacacctccctgttcgattggaactttataataaagctgatcctcagtaaaaaatgtggaagctggagtaggaccttgaaggtacttgcgagttaagttaaaattatttaacggggcagcactttgtcctgaatcagtaatcttaactccacttacttcatactcggtaccagtaggaataacagcgttatccgtactctgcattaaattagcaggaacagatgcaaattgaggcatcaacggtgcatacttaaaatcgtaatccataacaagaacactttgattgattacggcacttgcatcgtattcttcgataaagtttttgaatggtggaaatcctggtaaaaaagggggacttgtagttcccctcgcatctatagtataaatagtcaagtagtcctgcaaataaatctccgcacctgtagcgtctgcaggaggtgctttattaaaatcagtactgttattatcatacccatacatagctgtttttaaaccttctctgtattgggcagatgtttgttctttaaaacttactggttgcataggttcagtctcactataattatatctcctgttcgaagatgatatgtgaggaattgaacgaaaacctttagcaatttgaacaaacttattttggtttaaggttgcatttgatgtttgggtgtccccagtctgaaaggctaccctggtattccatgctttaatttcaatagatgcatgtttagcaaacgtaccaggatagtttttcattcggttatactctgctggagacatataaaagaataaatactcccaaggaatactagccataccagtagtcatagcaaatcgttttggaatttttaatgtactattttcagcctcagaaagaattacattagcatttgcactagttaaaaaacgccacttcttcctatacacatgagtttgtttatcaatatgcattccaattggtcttaatatacttgttggagcactggatccgtcgccgttcgcaccaccacgcgtcataccatctaagttgcctccagttcctggcagggatgttccactttttgctactttagatggactgcctgtagagtcaggcgctaatgctcgttttacaccagttataccctccattggttgttgtcctgcacccgccattccactaggtcctgcttcttgtctgtcacgtacagcttgtagaaagttgtcagcagcagcgtcctcctcactgtttggtatctcgtcctcagcttcctctggctcaggttgacctcccggggtacctaaaagattaagatcaaagtcatctattacgtcctgttcatttggtatttcatactcttcacccccgggaggatcaaacctttcgccacgtcgtactctagctaacatccactgttcaacagcataacgccgttgcccttcattaaggcgatcccaatttggtctgtcccggggatgaggaccaagaggtttttcgcgtcttggcatattaactcaccgtatataacttttcctgtcaacgactcgacagtatgcttgattcccagcccgactgctcccactgccgcgtgtagccgagatacaggatctgaaccctggattgcctcgtgtgtaaactggttgattgcttctctgtccgcctgcaacacgtcagaatccttcttagcgtcctggtaatgaaggtcgtgaccctgtgcaataacgtcagctgtgttggtggcgggagatattcgatttccaggtcctagattcttcgaaagcggcaaagttagcgctttcccgtaccaagtaggttctcctctcgctagattggcttgtgctctgttggcctctacctccttctgctttgctgcttgttgttgttgttgaagacgtttttgtccagcccttggatttactagcctccagtgttgacgaaactgagtctttgtttccttattccaaggaacgttatacggtttaatatatttctgtctatctgctaaaggcaagcgtcgaagttcaaatggaactgacgcataataagcgtctctgtgtttaaataatcctaatggattaccggtagctgcagctctccctaattgactctggaagatagcgtcgtactgcgaccctgctgcacctgctgctcctgttggtcttaggggtagtttcgacgctccgtaccctgggtgaactctgctccggttgaggagtgatgtccgttctgttggttgttgaaataaagtctctgtagaggtactcgctgaactactcccactgttaaatccgtcgaggacaatgtactcgcccatactgacgcgctcggccttcccccactccttttattctctttgtccgccatttaatctcccttactgggtgcttgcccctaagcccctggcttagcactaacgacgaccacgacgacgggtggggttatatactcgctgaccttgataaccatggtttaccgataatagcaaattatcatggtaaccggttatcaaggtcagcgagtatataaccccacccgtcgtcgtggtcgtcgttagtgctaagccaggggcttaggggcaagcacccagtaaaggagattaaatggcggacaaagagaataaaaggagg

SEQ ID NO: 145 - DNA, 5335 bp, Blattella germanica densovirus 1
  source 1..5335: mol_type = genomic DNA; note = Blattella germanica densovirus 1 - NC_005041
tgccccaagcccacagcttgcaccggccgcccgcagctgccgctggaggggggagtcgtcgaccttgacttcaaccgaaccatggttatttacatttaatgaaatcaaccggttcatggttgaagtcaaggtcgacgactcccccctccagcggcagctgcggcggccggtgcaagctgtgggcttggggcaagcaccaaaatcaaggataaaaggaggcagcatgttgcagccgatttagttgtaagttgaagttggaggagagcagacgtaggtacgtaatggcatctttaaaagatttgtgtaaacaggcagtgttaaagtattatagatggaattggaaaaagacagaggttttaccagtaacattgcagaatgagttattaacagattggttaaaatgtgacgaagtagtattagaagaatttgaagaactaaacgagcgagctcatcaatgtgattacgaagttaatgtttggcgtagaatcaagcagataatgtgtccacaaatttatgttgggttaatggagcatccagatacagtacctcagtttgcttttgatcatagtcatataataacaacttcaattgtttggtataaagaagaatataacagtgaaactgaaagttatgaaagagaaagattatgtagtcagtgctggtatagaatggcaaatcctcgagcagatgatagtgcagatcagtggtatatgaatggatggacctttggacgcgaatatagtcattattgtgtttgtagtaaagaagacgttttagatataatacaggataaaaataattggtgcgctatttgtgttactcagagtttgattgatattttaacttatgatgagtgtgtagcagaaactgaatttcatgaaccaggttaccgtccatatgttactagaattaagggcaatactttgttgtagatgaattatggccgtctcaccgacttttggagccgctttggagtcactatgggagatgatgccggacgagatagcgtctcatccagcgacatggtggaagctgttggaggagagccctctggaggaccggttcaaggacaagctgaagtcacttctagttcggtggaccaaaaattacaagaattggttgatcggttcgtttcccgccttgaagaaaaaaattggaaagacagtggatactatattagcgatgtatatgcctgcgaatcatctgaacgagctaatgcactggctagacgactggagcaaagagctgaatctttcggaagaggatttatcggaatatttatccacaataatcacgtccatacaatccacgcatgcccctacacaagcaggacgtgcaggtgccagttcaagaacttccctgaagcgaaagaagacattagacgattgcttcgaaagcctccagccatcgaaacgttcacacgacgagactgggaaaatatcacaaagtatttttgtacgtcagggcgacgagcaacgttctttaaaatctttggacacctacaaagattacctcttgaaattacagctttatccgactctacaatatcaggccaagatggaggaggaccggactcaggcgtggagaactgcaatgatccgcttgaatttcacagtggaccagaagtcggggatattccagcgcgtcctagagctaaccgacgccgtaaaagacgagatcaaattgttgttggcggagacggaggaatcggaggagctacaggaataattttggacttgttaagtaagtgtgcagtctgtcctttaacagagatagtgtttactaaagaatatttgcaagatcccatagttgcttgtaaaagattagattcaaaagaggttaaggatgctatagatactagggctagtgtaatcaatacttgggaaagggaagattttgttgctttttataataatccaaatactatattaatttggagtgcacgttctcttaatgcatttgatagttattactttaattatgaagagtcttttaatgtagtaactgagttacttacctttcaaatgggtgaaaatcttgttcaattttgtaggaatcttgtagacactttggaatgtaatattccaaaacgtaattgctttgtagtttgtagtccacctagtgctgggaaaaactttttctttgatggtgttaaggattattatttgaattcaggacagatgaacaatcctaataaatataatcaatttgcatatcaggattgccataatagaaggattattatatggaatgaacctaattatgaaccaagggaaatggagaacttaaaaatgctgtttgctggtgataatttgtctgccaatgtaaaatgtaagcctcaggcaaatgtaaaacgaacacctgttattgtgttgaccaattcactgccaaatttttgtcaacaaacagcatttaatgatcgtgtaataacgtatcattggactcaggctacatttttgaaggactacaataaaaagccgagaccagatgcttgtgttgatgtactgtattctttattgcaataaacttacaattcaactgaatttagaactctttgtggtttaccatagaaatatgggcgatcaaatgtttgcaacattggtgcagttttagtagcagctgtaaattgtgaacgtaatggaatatctgatacattgcctcttggatacgtaaatggttctgttgaaacgcatctaagtctacattctactgtccaatacatttgacagtctaaccaagatgatgcattaattgtatttacagcagttccaagttttggtactgcacgaacaccaacgtgcaaactttcttgatcgccacatgttgctccttgatatcctgcctcattgtacaatcctccttgttccattggaaattttgtatataatgtatcaaagtcagtgaatgtactattagaaagtgcttctcctgtctttaaatcaacacctcctacttgtaaatgacctagagtcatagcatcttcctttctagaattggctccttcaactgcactaaatcctgtactaggcatcctaactgattgtagatctacaattttactacctgcaggaataacaacattagcaggttgactttctttcttttcaggaatatcacctggcaagtaaatagaatcttggtaatgtcttgctctagtagttaaaggagcatatttaaaatcatgatgtgcagataaaacttgtttaccaattaaatccattgaattaaattcagaacaatatttattgtattgaggaaacccactatctatagtttgtgaagcatatacagtataatatcttagtaaacccatctctttacctgttgatattgcaggtacagtcggagtatttgttgtacgagtagttgtaccatacatttcttttgataatctatctctaaatttttgtccagtatattgatctgcattagtttcaaacccaagcggtttcattggttcatcacttgaaaatgtataatctctatcactaccaaacaagtggggattgtttcttaaaccttttgcaatacgagtaaatttattttgatttaatgttgcttgtgtactattcgtatctgctgtttgaaaagctactcttggattatattgatatattttaatatcacagtctgttgcaaatactcctgtcatttctctcaatctattaaattcagcaaaagacatgtacataaatgcatattcccaaggaatgtttactaaagatgttgtcaatgcccatcgtttagccggagctgtagttgtacctatgtcgtcaggtagtattacatctgctacaccaaaagataaaaatttccatttttttgtgaaagtccattcaaatttctctacatgtattcccctagatataggcataatacccctactagcatctaaatctaacattgtactagaacccattgaaccatctgtattacctgaagtgcctggtaatgcacttccactatgttcagaaggtttatttttttttgttggagtactagcagaatcaggttcttccgctcctctttttcctgtaactatagcctctggtgcagacatcgtttgtgcaggttcttgaatcgttgaaggctgaactggcagttgagctggcactggatctggtcgtgaagaaggaccagcaactggttggtcgctgtttgatgttcctccttgtgattgttggggtgaacctatcggaaaattgtctaataaacgatccaattcatctaaatcttgtatggcattattaggagcaggtgaaggaggacgtgcagcaataggtggttcaaaatattgtcctcgtcgtactaatgctaaattatattgttccatggcatatctgcgctgtccctcgttcatccgctcccaatttggccgttcataaggaggtggtttattataattaactggcatatttaccgtattgtacctttcctgttagtttttccactagttgtttgcctgctaaaccaacggcaccaattacaccttgtgtctgtgatatagggttatgtgaatgtgtagcttcttgaataaactgccctattgcctctgtatcagcacgttgaatatcaatgtcactttttgcttcactataatgtatatcgtgtccttgtgcaataaaatcacttccagtttttgcgtcttgtattgtatttccaggtcctatattatttgaaaaaggtaaaactataccttgttgaattcgtttttgtcctgcacgtggattaactaatttccaatgctgtgcatactgtgctttagataccttatcccactttacaccgtaaggttttataagtctatctctctctgcaaatggtaaacgacgtaattcccaaggcactgaattataatattcgtctcttgatttaaatacattcaatggattaccactacttgctgcacgccctagttgactttgaaatattttatcgtattgtgcccctgctccacctgcggcactagttggtttcactggtaatctacttgcaccgtatccactatgtacttttggctctattccaccatattccactgttgcactattcactggtaacaaaggcactgactctaagccggacgtagacatactaacgactccacgtgtttcccgccctttttaaccttgatcttggtgcttgccccaagcccacagcttgcaccggccgccgcagctgccgctggaggggggagtcgtcgaccttgacttcaaccatgaaccggttgatttcattaaatgtaaataaccatggttcggttgaagtcaaggtcgacgactcccccctccagcggcagctgcgggcggccggtgcaagctgtgggcttggggca

SEQ ID NO: 146 - DNA, 3977 bp, Bombus cryptarum densovirus
  source 1..3977: mol_type = genomic DNA; note = Bombus cryptarum densovirus - NC_040626
gtgagtagataacagatgataagctgataggcgtgagcctgagatgggctgataacggacttagtctatctaagaggcggagaaggtagcagtggcgaagaagactatattaatcaatgcttgttacccaaagaattattccaatgggtgaatcaggcgagttatttgctagagaagatatacctacagaagaagaattcgacttgttgaacgagatactaggtgagcaagaacaaaatgtccacaatattgaatttgttgccaataacgagtatggaggacaagatggatttggagaagctgcacatactggagatgtgtctatggagattagtgaaggagctgctgatggaccagaagaaggaccaattcttattgtggtaccatcgagtgaaggcgctgtcgaattaccgcgagaaactactgctagaagaaggctcctcaggaaattattcttggaaagatttgagaaccagtatcgaagaaattcaatctcccatcaaatatatcggaaaggaacaatccgaggagctgatgctgaaattaaaagagtggtacaaggaaattttcgaggaacagcttatttggtttgcgatcacggagaccactatcacgttgtgcacgactgccatagatcaggtaaaagatgtcgctgtcaccgaatcatcgaaaccagaaatatcttcggccgagcagtcgctgaacgaattgttagagacaaccgcttcgacatccaacactgggtcaatctcgcagagtatttccaaaaagcggaacggaaacttgtctacatggaaatctgtgggagagaaaggactgaatgtctacaagatcgagaagtactcgttcaaggaggtgagcaagatggacaagagccaatggtggaagacaccatcggcagtgagggccctgtttgtgacttcgtctccattggaccctgtggcaatccatgcagaccaggtccttctactaggaacgaagaaactgacaaagttgccgggagtgcagaaggaggaaagacaactaacgtcgaaaagtacatacgacagtttctcacgtctccaataagtcatctattgtctaccagttattggataaattctaagtattatatgttaaatacacagtataattggtttcaatgtgtattacgtaaaatatcttttcaatttaatcgtatgactctattcgaattatttgaatatgctagacaattggatgtggataaattaatttacgctagccctacggaaatggtatttgactattattacgatatacgtacaagtgtttatattttagatgaactactaagatttcaaatgccagaagatgaaattaaaccgtttttagagactttagtttctgttttagataaaactataccgaaaaagaattgtattcatgtaaagggaccaccgtgtgctggtaaaaatttattttttgattgtgtatgtgcattttgtataaattgtggacatctcggtaattttaatcgatataacgcatttccgatgatggattgtattgataaacgtgtaatcatgtggaatgaacctatgatggaatcatctgctgcggaaactttaaaaatgatttttggaggagatacgtgcccagtaaaagttaaatatatgggtgataaattattattacgtactccgataatttgtttatctaataatcaaccgtttccacgtgatgatgcgtttcaatgccgaatgtttacttacgaatggcagcaatgcgatgatttaaaaaaagtacagaaaaaaccacatccattagcttttccttacctgttaattaagtatcggttatgggaagatattgtattaaatgaaaaagaacaagaatatatnnnnnnnnnnataatatttttcaataaatgtattaattattacattgcgttgatttattttgtacatcttcaacagcagcacctacttgtctagattgaacaggtaattctaatttagaaaaagaagaatttggatttcttcgaaatgttgacgatgttcctggttccggacaaattttcttcggtgttggtggaatggtatctgcagatgatacactagtagcaggtgtattctctcttgttgttataccatgtaacattggtgtcaatccagatagagtaggccatccgttatatgtattattatatgtccaaagcgtaacattcttcggaaattgacaagtcatattctgtgcataatacgatccatgtttaatttccacatctaattcagcttctactgcccaatatgcagatgtattttggaaagtagcattatcattagatggtttcattccaggtacagcttgaattcctacgtgtacttgaggttgagcttgataactccatcctccgcttatcatattatgtccagctttttctaaaaattctgtattatttactttaggcgtagttgtatacatatctaaatgatctaatcgaccttcggtatgtgctagtgttgcatcttctttgtaaatttttaacgaaaatgctcttgtttgaggaccacctctatacatattttctttctgaatatttgttccattataaaaaggaatagataaaggagcgtgtttaaatttatatttataatcaacaataggttgtccaatagctgtatttattaaaaattgatctacatgttgatcttttctcatttgtccacaaatatttttaaaagctcctggtgttccattctttcctggtgaaacgaaacaagcataacctatggcgtgtctactaaccaaattcacatgcgcatcgtcgttgatataatatctatccattatatctgtaggattgatatcttgtattccgctaggcaacatatcatcataatctctatatgtaacattactaatttcggtattcaaattaagtccaactgctttcattccaataggtacaaattcatttgttgtatgtcctgttacagctccaccaaattcaaatgcagtacgtatacctaatggtgtaattctaactctacattcttttgcccatgcatcgttagatatttctctgaattctgaaggtgatagataaaatccagctaaatctacaggaactaatgccaatggtgtagtataataatcgtcagaatttagattaattctttttgtagctattccataactgaaaaatatcctagttttgcgaaatgtatatgtcatcggagctggaggtaatgatcttggtatagacactatatgtcctacacctgtcgtaccactagatcgtccactagcacctgatggtccatttcctgccaaagctgttgcttcattacgttgaatattctgactagactgtgttggaggcatgtctacttgcatttcctccaaatcttgaaataatgcgaaatgattctcgtccaattcgtcctgtccttctggtggaggtgtatctggtcttgcaatatacctttgttccttactatccgactcaccgtgttctttatgttgatttgatggacctgcttcagctggagaagctaaatctcgccaagcatctctactatgtgcctgttgtatttctctaaatgataatccagtttctctactcaaatcagctaatcttctctgtacctttgcgtatttttctctctgtttcaattgcgcagctgaaggtttccttttcatattccttggatataacacaccagttaaactctccaatccatactttgctgccaatccagctgctcccaaatatccgtgtgcactatttaaatccaaaaaatgttttattgcgtctcgatctgcttcacgaatatcctcttgtgttttagcttgattgtacaaatgatcgtgaatttcggctatttcgtcatcttcgtccactggtttgccgttgcgcaatttattccctggacctagatacttatggccgtaccaattcatactgaccagtttgtgctacaaagataagtatatatacctctttccatgac

SEQ ID NO: 147 - DNA, 5076 bp, Bombyx mori densovirus 1
  source 1..5076: mol_type = genomic DNA; note = Bombyx mori densovirus 1  - NC_003346
ttctctcaatatataccaccaccacaaccccccggaacacaggcccaaaattttcgctgaccacgacgcgcgaagcgcgtcacttcgtgtggtcacttcgtagcgaaaattttgggcctgtgttccggggggttgtggtggtggtatatattgagagaattttttctagtctttgtcggtttgaactggtatgaacctgtctgtgacgtcatagttggtgtacgtgacttgccttgagtacacaactgataataaataaggtggtagtgataatataataatatagatatgataagaagataaagatagatataaatacagtataagaatagcacacattaaaatgtccacacagtctggcgcttacgaggactcctgggaagacgggcttaatccatttgacgaagactacgtagatcttgtaaggtgcatgcgcaatagaggtgaacacgaagaatatacagacttgcttgataatgttaatactcctcgtgaacttttgtctgctatggagtcttttgaagagtcttcaaatgaaattccaagtcaagcagcgaccggagtatttgcagaaactggaaaccgttatgatgtccacgatccaagattgggatactatgatgaaagttgtgagcgcagaagaagaaatgatagaattcttaaccgaggaattctcagcatttattcaaaaagattgcaaaaacaactcgttggaagaattgtacgaaacagtggacgagccgaaattggtacattcaagcctagctacgatgaagtattacttaacgctcatcttacagaacaaagcaaaagaaactacggatttgaaaggccattccctgtcagttatcaacaaatggaactctgtcataaagacgcctttgaaactcctatcgaacgagaaagaagcctcgaccaattctttcgagcggtggaacgcagaatgggaatcctcgcagatcagttatgcagagcttttgagaataatacagttaatgcaagaagaattttacacgactccattgagtttagaccaggccacagatttcgtgaaatggtttacaaaatcaggagagctcttgatagcagaggttcgtacgctatttggttccatgaaacaaataaaggaacggaagactacccagaagacattagtagaggatacccacccgactacgatttcggagtcataccgactagataccgatactgcggaaagccagcaatcgagccaatcagaatcagagagggaggaggagaatcgcaggaaccgaccatcgagttcaagacatataaatactactcggaaaagaaagtctatcacaacatcgaagggcgtgcttacgaagaaaaaaagtttgaagaaccaacccagggccatttccacatacttcacgcctgcagatggtacaataatgaatgcaggtgcctcgggaggagctttgacgtcaatccaaggaagaataaggcaatccctatcgacccggtcgacacggaacatatacgcaacattgtgttctataacacaaaatggccccgatggcctgtgcacatcaaagtggccgacggacccgaattcgaatatgtttatagaactgaatctgtttgcaaagaatcaatacaacccaagcgacactcgcaacaactggaagagagcaacgatcaggatgaaagtggaccttccggacaacagtcgtcacgcctaccaactaaaagagataatagatgcgcagatgtcccgcatggaagatcatccagaaacggaaacccagtcgaaaagttcgtggagcaattcaaactcaggccaacatggcccttggaacacatattagacaccaaggattggcttgaaagtgaatggggtacatatatagctagtgacaaacaaatacagcgaacatttcaaatacttatgaaaataactatgaatatgacctacagtgatttaaaaatgctctatcagaatgaacacactatgcctatttggggagcaataagtagtaatgacttattaaacacgtattataccatagaagagtcacagcaaattgtagaagaactactcgacttccaaatgcataatgatcaactagagtattttgacagcatagaggatgcaaaaaaaaggtttataacagacctatatgagattttagagaagaagcatcaaaaaacaaacacattccaaatagtaagtccacctagcgcaggaaaaaacttttttatagaaacagtacttgcattttattggaacactggggtcattcaaaattttaaccgatacaacaatttcccgttaatggaagctgttaatagaagagtaaactattgggatgaaccaaactttgaaccagatgctacagaaacgcttaaaaaattattcgctggaacagccctgaaggccacagttaaatttcagaaggaagctaatgttcaaaaaacccctgttattattacagcaaactacgacaaattcactaaagaagtatgggacgatcgtatcattaaatattattggtatccttgtcctaaattaaaagaatataataagcgattacatccatttgcgtgggtttatctagttgataagtatgtaaccgatttgtaatctaatcaaaatgtataatcacaggtgatggtaataaatatgtaatcttatcaaaatgtataaatataggtgatggtaataaatatatttagtgcaattccatatgcctcgtattcattttccttatcataattatcttggtccgggtactgataactttgaaaaaaatccaatagacgaagacgacgctatcgcgaggtcgcatgatttggcttacgataaagtaaccaatcataaggaagtttttcaagctgataaacaggcccgtgacgagttttttacttcatttgtgcatactggaaacgtgcatagtttaattggcggtattggacttggaactaaaaatttggtagaagaacatgtactaggtaaacccttgtacggaatgggcaaaagaaaatcaactgaaaaagattgggccaaaatcaaaaggattaatagagctagagccgcaagacgagaaaaccaagaaaaccaaccagatattagagaatttggacacgtagctggacaaaatattaacgcagaccaagaagtaaatttggctgacttccctgactttttacaagactttgtagccgaagcaggaccaagtggaactcaaccagtcgaaacagcacaacaatctcctccaacaatgtctgaagatatacaaccaatggaaaccgtcggggccactgataccggagcaggagctcaagtcgatccacgtactggaggacaagcagctggaggatccggaggaatgggagctggtggatcagctaatgatggtagacaagacattttttctggagcaccacaaccaaatcaacatcatacattagtatatggaaaaagctaccatttcacaataacaaatggtttacctgaatttcgacatttagcaacaacgaactcgggctattacgctcaacaacgttttaaacatatacatggaattccatgggaaagactactaatgtatgtaagtgaaggcgaactcctccgaatgtttagagattatacttcattgaaagtggaagaagtagtatgtgaagtctatagtctcggagtacgattaccttttgtaacttcagccactaccagttcagttgctaacgctaacgcacaatatcccatcggatgttttcattttgatgaagcttatgaaaccaactacggcataaataatgtagcagacatcataaataaagctcttggaactgaatggaaaaatgctacacggcctactgctgctgtaacaacagcttggtccgaacaatttccgaatatatcggcatcatctacgagtagggatataaacaatcccgtaatcgttgattattctcttccatattttgaaaataatgtgcctaaagacgtcggaatatatgactacgttgacattaaaaatggaactactgcttacggtaaatgctgggaaaaacgatttaaacctacgaatggacttttatatgcggagagtactttgaaaggaaacgtagtcactccgcttgcagcgcaaccaactaatataatgacaccaatacctggattagaaaatgggtatttcatgagcaatgaccaaataagagaacgacgagacctaactacaagtgtaccacctgtagctctaacagctacaaaattaaatcaaagtgcttctaataatttaaatgcatttgtggattacatgggttataattatttcggcgaacaaaaatgcgctccgcaatcaatgcctaagtttatgattggatttgtaaacattagaaatgaagacaattctctacttaatgctaaatgggacattttaattaaaactcgaattagactcactggacttcaatctactagggaatgggttgctagaacggatagaattccgccacaatatttcacatcacaatatacgcagttccgctatcctaatataaatgaaactcctctactaaggtctttgggtacatttaagttaccaactaaacgaccaggaatggattcaagaatagccgctgggcgagctgcagaaacaacgcaagatgaatttatagatgcacaaaagaaacttcgtcataaatcggctttgttacctataattgagaaacctgtaactagatctagtaaactaaataaataaatatacctatattaaatatacctttattgttttaattagcaaaacctaattataatatctatatcattatctatcttaatatctaatctataattaatacttaacatacgtacattaagtcacgtacaccaactatgacgtcacagacaggttcataccagttcaaaccgacaaagactagaaaaaattctctcaatatataccaccaccacaaccccccggaacacaggcccaaaattttcgctacgaagtgaccacacgaagtgacgcgcttcgcgcgtcgtggtcagcgaaaattttgggcctgtgttccggggggttgtggtggtggtatatattgagagaa

SEQ ID NO: 148 - DNA, 5078 bp, Bombyx mori densovirus 5
  source 1..5078: mol_type = genomic DNA; note = Bombyx mori densovirus 5 - NC_004287
attctctcaatatataccaccaccacaaccccccggaacacaggcccaaaattttcgctgaccacgacgcgcgaaacgcgtcacttcgtgtggtcacttcgtagcgaaaattttgggcctgtgttccggggggttgtggtggtggtatatattgagagaattttttctagtctttgtcggtttgaactggtatgaacctgtctgtgacgtcatagttggtgtacgtgacttgccttgagtacacaactgataataaataaggtggtagtgataatataataatatagatatgataagaagataaagatagatataaatacagtataagaatagcacacattaaaatgtccacacagtctggcgcttacgaggactcctgggaagacgggcttaatccatttgacgaagactacgtagatcttgtaaggtgcatgcgcaatagaggtgaacacgaagaatatacagacttgcttgataatgttaatactcctcgtgaacttttgtctgctatggagtcttttgaagagtcttcaaatgaaattccaagtcaagcagcgaccggagtatttgcagaaactggaaaccgttatgatgtccacgatccaagattgggatactatgatgaaagttgtgagcgcagaagaagaaatgatagaattcttaaccgaggaattctcagcatttattcaaaaagattgcaaaaacaactcgttggaagaattgtacgaaacagtggacgagccgaaattggtacattcaagcctagctacgatgaagtattacttaacgctcatcttacagaacaaagcaaaagaaactacggatttgaaaggccattccctgtcagttatcaacaaatggaactctgtcataaagacgcctttgaaactcctatcgaacgagaaagaagcctcgaccaattctttcgagcggtggaacgcagagtgggaatcctcgcagatcagttatgcagagcttttgagaataatacagttaatgcaagaagaattttacacgactccattgagtttagaccaggccacagatttcgtgaaatggtttacaaaatcaggagagctcttgatagcagaggttcgtacgctatttggttccatgaaacaaataaaggaacggaagactacccagaagacattagtagaggatacccacccgactacgatttcggagtcataccgactagataccgatactgcggaaagccagcaatcgagccaatcagaatcagagagggaggaggagaatcgcaggaaccgaccatcgagttcaagacatataaatactactcggaaaagaaagtctatcacaacatcgaagggcgtgcttacgaagaaaaaaagtttgaagaaccaacccagggccatttccacatacttcacgcctgcagatggtacaataatgaatgcaggtgcctcgggaggagctttgacgtcaatccaaggaagaataaggcaatccctatcgacccggtcgacacggaacatatacgcaacattatgttctataacacaaaatggccccgatggcctgtgcacatcaaagtggccgacggacccgaattcgaatatgtttatagaactgaatctgtttgcaaagaatcaatacaacccaagcgacactcgcaacaactggaagagagcaacgatcaggatgaaagtggaccttccggacaacagtcgtcacgcctaccaactaaaagagataatagatgcgcagatgtcccgcatggaagatcatccagaaacggaaacccagtcgaaaagttcgtggagcaattcaaactcaggccaacatggcccttggaacacatattagacaccaaggattggcttgaaagtgaatggggtacatatatagctagtgacaaacaaatacagcgaacatttcaaatacttatgaaaataactatgaatatgacctacagtgatttaaaaatgctctatcagaatgaacacactatgcctatttggggagcaataagtagtaatgacttattaaacacgtattataccatagaagagtcacagcaaattgtagaagaactactcgacttccaaatgcataatgatcaactagagtattttgacagcatagaggatgcaaaaaaaaggtttataacagacctatatgagattttagagaagaagcatcaaaaaacaaacacattccaaatagtaagtccacctagcgcaggaaaaaacttttttatagaaacagtacttgcattttattggaacactggggtcattcaaaattttaaccgatacaacaatttcccgttaatggaagctgttaatagaagagtaaactattgggatgaaccaaactttgaaccagatgctacagaaacgcttaaaaaattattcgctggaacagccctgaaggccacagttaaatttcagaaggaagctaatgttcaaaaaacccctgttattattacagcaaactacgacaaattcactaaagaagtatgggacgatcgtatcattaagtattattggtatccttgtcctaaattaaaagaatataataagcgattacatccattcgcgtgggtttatctagttgataagtatgtaaccgatttgtaatctaatcaaaatgtataatcacaggtgatggtaataaatatgtaatcttatcaaaatgtataaatataggtgatggtaataaatatattcagtgcaattccatatgcctcgtattcattttccttatcataattatcttggtccgggtactgataactttgaaaaaaatccaatagacgaagacgacgctatcgcgaggtcgcatgatttggcttacgataaagtaaccaatcataaggaagtttttcaagctgataaacaggcccgtgacgagttttttacttcatttgtgcatactggaaacgtgcatagtttaattggcggtattggacttggaactaaaaatttggtagaagaacatgtattaggtaaacccttgtacggaatgggcaaaagaaaatcaactgaaaaagattgggccaaaatcaaaaggattaatagagctagagccgcaagacgagaaaaccaagaaaaccaaccagatattagagaatttggacacgtagctggacaaaatattaacgcagaccaagaagtaaatttggctgactttcctgactttttacaagactttgtagccgaagcaggaccaagtggaactcaaccagtcgaaacagcacaacaatctcctccaacaatgtctgaagatatacaaccaatggaaaccgtcggggccactgataccggaggaggagctcaagtcgatccacgtactggaggacaagcagctggaggatccggaggaatgggagctggtggatcagctaatgatggtagagaagacattttttctggagcaccacaaccaaatcaacatcatacattagtatatggaaaaagctaccatttcacaataacaaatggtttacctgaatttcgacatttagcaacaacgaactcgggctattacgctcaacaacgttttaaacatatacatggaattccatgggaaagactactaatgtatgtaagtgaaggcgaactcctccgaatgtttagagattatacttcattgaaagtggaagaagtagtatgtgaagtctatagtctcggagtacgattaccttttgtaacttcagccactacaagttcagttgctaacgctaacgcacaatatccaatcggatgttttcattttgatgaagcttatgaaaccaactacggcataaataatgtagcagacatcataaataaagctcttggaagtgaatggaaaaatgctacacggcctactgctcctgtaacaacagcttggtcagaacaatttccgaatatatcggcatcatctacgagtagggatataaacaatcccgtaatcgttgattattctcttccatattttgaaaataatgtgcctaaagacgtcggaatatatgactacgttgacattaaaaatggaactactgcttacggtaaatgctgggaaaaacgatttaaacctacgaatggacttttatatgcggagagtactttgaaaggaaacgtagtcactccgcttgcagcgcaaccaactaatataatgacaccaatacctggattagaaaatgggtatttcatgagcaatgaccaaataagagaacgacgagacctaactacaagtgtaccacctgtagctctaacagctacaaaattaaatcaaagtgcttctaataatttaaatgcatttgtggattacatgggttataattatttcggcgaacaaaaatgcgctccgcaatcaatgcctaagtttatgattggatttgtaaacattagaaacgaagacaattctctacttaatgctaaatgggacattttaattaaaactcgaattagactcactggacttcaatctactagggaatgggttgctagaacggatagaattccgccacaatatttcacatcacaatatacgcagttccgctatcctaatataaatgacactcctctactaaggtctttgggtacatttaagttaccaactaaacgaccaggaatggattcaagaatagccgctgggcgagctgcagaaacaacgcaagatgaatttatagatgcacaaaagaaacttcgtcataaatcggctttgttacctatacttgagaaacctgtaactagatctagtaaagtaaataaataaatatacctatattaaatatacctttattgttttaattaccaaaacctaattataatatctatatcattatctatcttaatatctaatctataattaatacttaacatacgtacatcaagtcacgtacaccaactatgacgtcacagacaggttcataccagttcaaaccgacaaagactagaaaaaattctctcaatatataccaccaccacaaccccccggaacacaggcccaaaattttcgctacgaagtgaccacacgaagtgacgcgcttcgcgcgtcgtggtcagcgaaaattttgggcctgtgttccggggggttgtggtggtggtatatattgagagaat

SEQ ID NO: 149 - DNA, 5002 bp, Casphalia extranea densovirus
  source 1..5002: mol_type = genomic DNA; note = Casphalia extranea densovirus - NC_004288
tattctcaatatataccaccacaacccccccagaacccaagcccaatcctattgcgatgaccacgacgcgcgaagcgcgtcacttcgtgtggtcactacgtatcgcaataggattgggcttgggttctgggggggttgtggtggtatatattgagaatattttttctagtcttggcggtttaaactaaatcatgacgtcacaatggcctacgtgacttggtatacgtgacctaaaacaacaaagtggcgtacgtgagataatgtaatgaggtggtggtgataatttaataatagaaatatgataagaagataaagatagatataaatatggtataagaagcgatacattaaaaatgttaagtcagtctggcagttacgagcactcatacgaggaccataattatcctgatttggatcatacacttcagttgcggagcttcagatacgacagtgaagacgactataagcacttatttgataatgctaatactactggtgaactcttgtctgctatggagtcttttgaagagtcttcagatgaaataccaagtgaagcagcgacaggagcacttgaagagattagaaatcgtgctcaagtcggtaatacaagattgggaagacatgctgaaagaacattcaaccgaagaagaaatgatagaatacttgacagaggaattcttagcttttattcaaaaagattgcaaaaacgactcattggaaaccttgtacgaaacagtggaagaacccaaactaatacaatcaagcctagctacgatgaagtattacttaacgctcaccttgcaaaacaaagcgaaagagactacgggcttgaaaggccattccctgtcagttatcaacaaatggaactctgtcataaagacgcctttgaaactcctatcgaacgagaaagaagcttcgaccaattctttcgagcggtggaacgaagaatgggaatcctcgcagatcagttatgcagagcttttgagaataatacaagtaatgcaagaagaattctacacgactccattgagcttagaagaaaccaaaactttcgtaaaatggtttttgacatcaggaaagtacttgataaaagaggttcgtacgctatatggttccatgaaacaaacaaaggaacggaagattacccagaagacatctgtagaggatatcccccagactacgactttggagtcatatcaactggattcagactcagcggaaagccagcaattgagccaatcggaagaggaggaagaggaggaagagatccccctgacccaagaatcaaattcaaaacatacaaatactacccggaaacgaaaatctaccatgatgtctacagggaaatttatgaagaagaagcttttgatgaaccaaccgaaggccatttccacatacttcacgcctgccaatggtacaacaatgaatgcaggtgcctcggaaggagctttgatgtcaatccaaggaagaataaggcaatccctatcgacccggttgacacggaacacatacgcaacatcatgttctataacacaaaatggcccagatggcctgtgtacatcaaagtggccgacggacccgaattcgaatatgtttatagaactgaatctatttcaaaagaatcaatacaacccgagcgacagtcgcaacaattggaagagagcaacaatcaggatgaaagtggaccttccggacgacagccgacaagcctaccaaataaaagagataataaatgcacaaatgtcccgcatggaaaatcatcccgaaacggaaacccagtcgaaaagttcgtggaacaattcaaactcaggccaacatggcccttggaacacatattagacactaaagattggcttgaaagtgaatggggcacgtacatagcaagtgacaaacaaatacaacgaaccttccaaatacttatgaaaataacaatgaatatgacctacagcgaactaaaaatgctctaccaaaatgaacatacaatgcctatatggggagctataagtagtaaagacttattaaatacttattatacactggacgaatcacaagaaatagttgaagaattattagactatcaaatgaacaatgatcaattggaatactttgacaacatagaagaagcgaaacgaaaattcattactgatctttatgaaatcctagaaaaaaaacatcagaaaacaaacacttttcagatagtcagtccacctagtgctggaaagaattttttcatagaaactgtattagcattttattggaacactggagtcatacaaaactttaatcgctacaataatttcccattaatggaagctgtgaatagaagagtaaactattgggatgaaccaaactttgaaccagatgcaacagaaacattaaagaaactatttgcaggtacagcactcaaggcaacagtcaaattccaaaaagaagccaacgttcaaaaaacacctgtaataataacagcaaatcacgacaagttcacaaaagaagtatgggatgatcgtattataaaatattattggtatcaatgtcctaaattaaaacaatataataagcgtttacatccttttgtatggtgctatctagttgataagtatgtactcgatttgtaatcttatcaaaatgtataaatattggtgaaggtattaaataaacttagtatttttccacatgcctcgtattcattttccttatcataattatcttggtccgggcagtgataactttaaaaaacaaccagtagacgaagacgacgcaatagccagagcacatgacctggattacgataaagcaagctctgataaagacattttcaaggctgataagcaggctcgcgacgagtttttcagttcatttgtgcacagcggaaacttgcatagtttaattggtggactaggacttggagctaaaaatctagtagaagagcatgtactaggtaagtccttgtacggtatgggcaaaagaaaatcaaccgagaaagattgggctaaaattaaacgcattaatacagcaagagcagctagacgaaataacgaagaaaaccaaagagacattagaaactttggacacgtaggaggagaaaatattaatcctgacgctgaagtaaacttggcagatttcccagattttttacaagactttgttgccgaagcaggaccaagtggaagtcaacccactgaaacagctcaagaatcgccaccaggaatgtctcaagatgaagttcctatggatacggtaggagccactgatgttggaggaggagcacaagtcgatccacgaagtggaggacaagctgctggaggtatgggagcaggaggtgctgcaaacgatggacgacaagacatttatgcaggagcgccacaacctaaccaacaccacgaatttgtttatggaaaaagttatcattttactttaacaaatggcttacctgattttcgtcatttcataaacacaataagcaacaactattctgctcaattacgatttaaacatattcatggtataccttgggaacgtttattaatgtatctgagtgaaggagaatatctacgtttgatgcgcgactatacagcggttaaagttgaagaagttgtttgcgaagtttatagtctaggagtacgtttaccattcgtgacttcagctacaacaagttctgtggccaatgctaatgcacaatatcctataggatgttttcattttgataaagcttatgaaacacaatatgatgtcaacaatattaatgatattaatgacattataaataaagctttagggtcagaatggaaaaacacaacaagaccagctcaaccagtaacaacttcgtggtcagaaacttttccaaatataactgcatcagcaactagtcgtgatattaataatcctgtaattgttcagtaccctttaccatatggaataaataatgctcccaaagatgttggtatatatgattatgtagacatcaagaatggtacaactgcttatggaaaatgttgggaaaaaagattcaaacctaaaaatggaatattatacgcagaaagtagtttattaactaatggtaatactacagcagttgaaggtcctaccaattttatgactcctataccaggtcttgaaaatggttattttattggaactaatcaaataagtgaacgttctgattctcaaatacgtataccaccaaaagcttatactgcaactaaatataatacatctgatgcttctagactagaaagtactgttgattataacggttttaatttttttggagaacaaaaatgtgctccacaggctatgccaaaattcatgattggttttgttaatatccgaaatgaagacaattctttattaacagctaaatgggacattatgattaaaacacgtattcatctaagtggactacaatctactcgagaatggatttcaagaactgatacaatcccaccacaatggtttacatcgcaatatactcaatttcgttatgaagacatatttggtgttcctttagtacgtgcaaatggtatgcaaactaatcctactcacagacctggaatgatttctaattataatcctaatagaagtaatacagaaaatgttgccgatcaagacgaaactataataaatagccagaaaaaacttagacataagtctgcattgttacctttacttgaaaaacctgtaactcgttctaaaaaacttttaaaacaataaatgtattctatcttatctatatcttttattactaccaccacctaaattattataaaattaaagtcacgtataccaagtcacgtaggccattgtgacgtcatgatttagtttaaaccgccaagactagaaaaaatattctcaatatataccaccacaacccccccagaacccaagcccaatcctattgcgatacgtagtgaccacacgaagtgacgcgcttcgcgcgtcgtggtcatcgcaataggattgggcttgggttctgggggggttgtggtggtatatattgagaata

SEQ ID NO: 150 - DNA, 5012 bp, Sibine fusca densovirus
  source 1..5012: mol_type = genomic DNA; note = Sibine fusca densovirus - NC_018399
ttctctcaatatataccaccacaacccccccggaacccaagcccgaatccaatttcgatgaccacgacgcgcgaagcgcgtcacttcgtgtggtcactacgtatcgaaattggattcgggcttgggttccgggggggttgtggtggtatatattgagagaattttttctagtcctgccgattaaaaagtaggtcatgacgtcacaatggcctacgtgacttggtgtacgtgactaaaacgaaaacaaaacacttcagataagtaattgaggtggtggtgataaactaataacacagatatgataagaagataaagatagatataaataaggtataagagacgatacattaaacatgtcaagtcagtctggcagttacgagcactcatacgaggataataattatcccgatttggatcacacgttgcagctacgttgcttcaggtacgatagtgaagacgaatatactcatttgtttaataatgctaatactactggtgaactcttgtctgctatggagtcttttgaagagcctacagatgaaataccaagtgaaacagcgacaggagcacttgaagaaattagaagtcgtgatgaactcagtgatacaagattgggaagatatgctgaaagaacactcaaccgaagaagaaatgagagaatacttaacagaggaattctcagcttttattcaaaaagattgcaaaaacgactcattggaaaccttgtacgaaacagtggaagagcccaaactagtacaatccagcctagccacaatgaaatactacttaacgcttaccttacaaaacaaagcgaaggaaactacgggattgaaaggccattccctatcagttatcagcaaatggaactctgtcataaggacgcctttgaaactcctatcgaacgagaaagaagcttcgaccaattctttcgagcggtggaacgaagaatgggaatcctcgcagatcaattatgtcgagcttttgagaataatacagttaatgcacgaagaattttacacgactccattgagcttcgaagaaaccaaaattttcgtgaaatggtttttgggatcaggaaagtccttgataaaagaggttcgtacgctatatggttccatgaaacagacaaaggaacggaagattacccagaagacatctgtagaggatacccaccagactacgactttggagtcatatcaactggattcagactcagcggaaagccagcaatcgagccagtcggaagaggaggaagaggaggaagggatgaacctgaccccagaatcaaattcaagacatacaaatactacccagaaacgaaagtctaccacgacacacaaaggcaaatttacgaagaagaagcttttgacgaaccaaccgaaggccatttccacatacttcacgcctgccaatggtacaacaatgaatgtagatgcctcgggaggagctttgacgtcaatccaaggaagagtaaggcaatccctatcgacccggttgacacggaacacattcgcaacatcatgttctataacacaaaatggcccagatggcctgtgtacatcaaagtggccgacggacccgaattcgaatatgtttatagaactgaatctatttccaaagagtcaatacaacccgagcgacagtcgcaacaattggaagagggcaacaatcagaatgaaagtggaccttccggacgacagccgtcaagcgtaccaaataaaagagataatagatgcacagatgtcccgcatggaaaatcatcccgaaacggaaacccagtcgaaaaattcgtggaacaattcaaactccggccaacatggcccctggaacacattttagatacaaaagattggctagaaagtgaatggggtacatatatagctagtgataaacaaatacaacgaacattccaaatattaatgaaaattacaatgaatatgacttacagtgaactaaaaatgctttatcaaaatgaacatacaatgccaatatggggtgctataagtagtaaagatttaatgaatacttactattcaatagatgaatcccaacttattgttgaagagctcctagattttcaactaaataatgatcaattggaatattttgaaaatctcgaggaagctaaaagaaaattcattacagatttatatgaaattttggaaaaaaaacatcaaaaaacaaatacatttcaaatagtaagtcctcctagtgctggtaaaaactttttcattgaaacagtactagctttttactggaatacaggagttattcaaaatttcaatcgctataataatttcccgttaatggaagctgtaaatagaagagtaaattattgggatgaacccaattttgaaccggatgctgttgaaacactaaagaaattatttgctggaacggcacttaaagcaacagttaaatttcaaaaagaagctaatgttcaaaaaacacctgtaattataacggctaattatgataaatttacaaaagaagtatgggatgatcgtataataaaatattattggtatccttgtcctaaattaaaagaatataataaacgtttacatccttttgtatggtgttatctagttgataagtatgttatcgatatctaatcaaaatgtataaatataggtgacggtataaaataaactcagtattattccatatgcctcgtattcatttaccttatcataattactttggtccgggtactgataacttcgaacaacatccagtggacgaggacgacgctatcgcccgattgcacgacctagattacggtaaagctaaaaccgataaagatattttcaaagctgacaaagaagcacgcgacgaatttttaacatctttcattcatactggaaatgttcatagtttaattggaggaattggacttggtgcaaaaaatctagtggaagaacatgtattaggtaagacagtttacggtatgggaaaaagaaaaccaaacgaagataatattgaaaaagactgggctaagattaaaagaattaacagagctcgagctaatagacgtgcaaatcaagaaaatcaagaaaaccaagaagatattagaaactacggtcacgttcctggaagagacattcatccagatcaagaagtaaatttagaagattttcctgattttttacaggaatttgtagcagaagcaggacctagtggagttcaacctgttgaaacggcacaacaatcaccaactatgtctgatgaagaagtacctatggatacagcagcagcagcagcaggagcaactgatattggaggaggaccacaagttgatccacgaagtggaggtcaagctgccggaggtatgggagctggtggtgctgctaatgatggacgacaagacatatttgctggagctccacaaccaaatcaacaccataaacttgtatatggcaagagttaccattttactgttagtaatggcttacctgattttcgtcatttcttaaatacaattagtaataattactctgctcagttacgttttaaacatattcatggtattccatgggagcgtttattaatgtatctgagcgaaggagaattattgcggttaagacgcgattatacagctgtaaaagctgaagaagttgtttgtgaagtttatagtttgggagtacgtttaccatttgttacttcagcaactacaagttcagtagcaaatgcgaatgctcaatatccaataggatgttttcattttgatcaagcatatgaaactatatatgattctaataatgttgctgatgtaattaataaagcactaggagcagaatggaaaaacacaactagacccgcacaacctgtaactacagcatggtcagaaactttcccaaatatcagttcttccactacaagccgagatataaataacccggtaattgtacagtacccattaccatacggcattaataatgctccaaaagatgttggtatatatgattacgttgatataaaaaatggaacaactgcccatggaaaatgttgggaaaaaagatttaaacctgccaatggtattctgtatgctgaaagcagtttattaactagtagtaataatacaggagtagaaggccctacaaattttatgactccaattccaggtttagaaaatggctactttattggaacaaatcaaatatctgaacgtaatgatgcacaaatacgtgtaccccctaaatcttatacagcaacaaaatataatgctactcaagctattgttaatgaatccactgttgattatatgggctataactattttggtgaacaaaaatgtgcacctcaagctatgccaaaattaatgattggatttgtaaacattcgtaatgaagacaatagtctattaagtgcaaaatgggacatactcataaaaacacgtattcatctaagtggacttcaatcaacacgtgaatgggtggcaagaactgagactataccaccacaatggtttacatcccaatattcacaattccgatatgaaaatatacttactataccattagttcgagctaatgatttatcaaaattgcctacgaagagacctggatttatatcttccaataacccaacccgaaacaacgaagaatttgaaaatgaaaacgctatagaacaacaaagaaaacttagacataagtcagcattgttacctttacttgaaaagcctgtaactcgttcaaaaaaacttttgaaataaatgtattatatctctatctatatcttttattattaccaccacctaaatataaaatcaataataaaattacgtacaccaagtcacgtaggccattgtgacgtcatgacctactttttaatcggcaggactagaaaaaattctctcaatatataccaccacaacccccccggaacccaagcccgaatccaatttcgatacgtagtgaccacacgaagtgacgcgcttcgcgcgtcgtggtcatcgaaattggattcgggcttgggttccgggggggttgtggtggtatatattgagagaa

SEQ ID NO: 151 - DNA, 6334 bp, Cherax quadricarinatus densovirus
  source 1..6334: mol_type = genomic DNA; note = Cherax quadricarinatus densovirus - NC_026943
agttagttagtactattcgctcatgaatcatgcggcttcgccgcgattcgagcgaatagtactaactaactggtcgacgacgaggaggacgtagagtatatattattaatatatactaaacaagaagtgtacccgcaattagggggaggttattatcctttgttactggggggttacacttcttgtttagcatataaaaactggttagaggttatttgaaggttatgttatctggcctgtgattggctgttgaaagtgggcgggaaaggggcgtatattttggattggttaatgttgaaaatagggcggagttagcggaataaaaccagcgcgcagagcctgtggagctcagatcttctgctttcttcactactactggtaagcatggcttgcgtatacggtattgagaactgtgatcatacaaagtgttttcgctgtggagagtgcactagaggcagtcaagtacatagactttgttattccaacattacagaggaagactatgcgatatcacagttgcttgccagtagtacagagtgtctacctacagaaagcgacgaagaaacagcagaccagatacgctcagatacgccaatcagtatgcaggtacaagagtatctcgattgggagaatactgctctattttcgacaacataccgctttcatacatactggacacacttttatggcgatcgtgaggagattgattcagattatagtactcctgaggctagtgatgaggatagtcaatcactgctaaggaacaagattaaagtacataggtatcttacaagtgaaatgactgcacgagaattttttcttgcaaatagagactttgatattgatgttttgtgtttgccagatgattctcttattagaatgcgacttggtacagtgacaaaatttgatcctattgctaaacaacattttgtgtatcataaagagtgtattgatcctgaacaatttcatttgacagaaaaaggattcagtaaagctgttctttcagtaaaagcaacaaataagaatgcatttatctcattaattgaagatctgttgtttacatttttttgtcaggagtgtaagaaatttatttttcatacagtggagtatatggaagatagtgtatggaaattaccaaatgaaaacatctggccagactgcaaacatcttttatataattgtcacttactttatgatttaaatacttatgtgaatttgaaaggacataaattaattgctactgtttcaccgcaggaaccaccaacgaaacggcaacgcctagaattccatgaataatgtccaagaggaagctggaagagatgtcaccagaacacgaaacggaggaagaggaggactcggaaccagaaagagaagaagatcggactctggagaaagacggaatgacagcgggaccgaagatatcgttcacagcgatgttgcggagaatactacaggcgaacttaccgttgagccaagtacatccgggctatctactgggattcgtgacgatgatgacgggagagaccaatctaccagtagaactagagaactccctgtatggttttcaaaaagcgggccagatatggaacaacggtattggaaaggcttcaaagaaaggtgtgatagaatacttacagagctgcaaaactctgatgggcagttggttcgcgacatctttcgattcgaagaccctagagagtatgatgactttattagatgcatacaacgagacacaaattacagaagaggactgctccaggtatgtcgcgaagatagtcacatccacgtcgtgcacgactgcaccttcagcaacggaatgtgccggtgcgactggtacaaaaaggcgaaaacctacggggcacaccttagacgagataaacgttctcatcgacgaaattcctgtagaagtagaaccgcaaccgacattcaaaacctactcttctattattgcacgaaaggacgacaaattgtatatcaaaaaattcgaggacagctggaaagaataccaagtgaaggttacaatctatcgacgtcaagacttaatggactgtccgaatacttcagagaaatggcactacaaataccaggagatggacctgaattacaacagtgggagccagatttggaagttgatgagccagctgaagtaccaacaaatggagtacctcaacgaaaaaaacgtaaaatgggtgcccaagaaagaatacagctaaagacagttgagttgctggaattgtatcccatatgtcctccagaagctatagtaaaacataggatttggagatgtgatccagagctgagatttaagaatgtaaatgataaagaaattagaaatgctatttctagtttcaaggatacactgaccacttattcaatgaatgaatatcagaaaatgtacaataatcctgattgtatacctatatttagtgctggttatgggaattatgagacttattattataatgttgaaaatagcctcaaaattatggatgaactggttaattaccagtgtggtggagatgaagaggctatcattgattttgtgactactttatataatgtgttggaacgtaaagttcctaaattgaactgcattgtaattcactcacctcccagtgcggggaagaatttcttttttgatgcagtaaaggactattatttgaattgtggccatctatgtaatgcaaataaatataataattttccatttcaagatgcagaaggcagaagaattgtactgtggaatgaaccaaactatgctccagaatttctggaacagatcaaagaaatactaggtggagactccactagtgtaaatgtaaagtatcaaagtgatactcctgtgtatcgtacacctgtgattgtactgacaaataataaggtttcattcatgaatcattctgccttcattgataggattagggtgtttaactggatggctgcaccatttttagcacagtataagaagaagccaaatccattggcagtatatgacttctttaagaagtataaattggtggaagggtaaatatatatatgttggtgtagggtgaatatatatcttggtgaagggtgaatatatataacatgatgtaaaggtgaaggtatcaagcaaacaaaaaataaacttcagcaggttttattgagttttatttacaccaaaacagacttcttacgaagtacacgagttgaaacttcaggaagagaacgacgtggtctctgtcgagaaggaacacagaccatatcgtcctcagtaggttcatcacctacttgatctattggattaacggctggagcggtagcgctatcattcagtaatccaaatgtaacaaacttctctggtccaaatgcaggataagtaccaatacccatggcagcattctcaaggctagtattgtagaacttgggtctaataaatctatttggataagatggaagacgtacaactagtacagcttcaatttcaaattcaatgttggcatgaacaaatttactagctcgagaatcattgtcagcgggactggctttatctatagctctcataccaatatggtaactaggttggcgagaaggcttgccagcagagtcacctcttacataataagaacctttttccattggagcagatttataagtaactataggaagtgaattcctattagatggaacaaaagattcagcaatagcagtatttccaccaactgtagtaccagtgacagttctcttggcattataatactgagcatttccaacactttggttgaaactatcagtaacaatctccaactgtttaaactgttgcccaataggagcataattaaatttatacttcatagtatcaacatgattccaagttgtatcattagcattacattctctgatgtaattttggaaatattcaaagccaggagaagaatcactagtaataacaggtggagtagctgtattttctgtgaaaaatcctttagctttagcttgagctctgtttggttggtaaacacaaaaatggttctgattgtaaaaaggaattttatggcctacaccaggtactacaatagcattatctgcagcagtttgatcagtaccatactgtttggcaatgaaatcatcatagataacagaagaatttgcatcagcctttaaactaggaatcatattatcactgaaatctaatcctctatctattccacctctcatagttttctctaagtcttttccaatacataatactttaggatggtttgtagtagctgtactagcttcagtccctccaatgggatatccagtactagccacagtctgagtaacatttatcagacaagaatccataaaagatccagcaggtaataataaaaattcttcaggagacatatagaaaaatgcatattcccatggtattttagctaacggagtagtaactatatttgcaccactccttacagtagatgcagctatattccaataaggaatagcccaagatttcattctatgaacctttttaaaaaccatatatcctgatttcacttcatatcctccggttggtaagaacgaaataggtccttgtgctgagtcaaaacctccatcactgctcgaattatggccagttccttgcgcaggggcagctggagcggcttcaggacgatcagcaggtgcaacagaacctccttgttcatcttcattcgggcgtttttgtccacgtgtactaaccatttctatatcgtcgtctggaagacctggacttggatcagcagcactagatggaccagcaccgtcacgattatcaaaatctgcaatagaaatagatccaccttcaatttgtgataaaatatcagtgatttcagattgttcatcaggagtaagatcatcagctacacttttactaagaacatcaaataatggaccagaactgccagatttacgagtatctttccattgtctataactaatactagtactaggttgccgtaaacccgttctaggattagtaggaggcctgaaagtaactccaagacctaatctaggaggtggatctactctaggcagaccatgattttgacgagctctgttccaagcatcccatacataacgttgttgacttttactactaggaaaatcatcatgacggctaggatctctatgtataggatacttattaagtgctcttatttcacgtcccatacctggatcagaagaaataggtagattagcaggatatttcacaccaacgagaccttcaacagtttctttagctttaagtccaatatatccagctatactatgtggattactattttcaattatatcagttaaaaattcaccagcagatttcttatctgcgttctgaatatcttgttgagttttagcttgttcatacgctttatcgtggtctaaagcaatatgatcatcagtatctacaggtttaattccacttaaagtattaccaggaccaatataatgatgatcaggtaaacttaccactggatctatatgattaggttcttcaacagaatcggtactcttagttgtcaaaccgccaataagaccaccaataatagcagatccaataagaccacctccaacagcaagagcagtactaccgccactcgcaacagcacttccagtacccgcagcagcagcaccaacgccgccagtactacttaataatggagtagtttctgatgcagtagtaccaagacttaatccttcttcaacactagaagataattcagtagtatttaattcaatattatccaatggtatttgttcacctgaatttaattgactaaaattatgctcaaaatttatatattcattaagatttactgctccttcacgaatatctataggaatattacgttcagcaagtcctaccgcttgagaataagtatagtttggaacagttttaaaaagaccgccagcagtacgaactgaatattgaattctactgccgcctgttctcctaattaactcgaaggcttcctcagccattatggagctccacaggctctgcgcgctggttttattccgctaactccgccctattttcaacattaaccaatccaaaatatacgcccctttcccgcccactttcaacagccaatcacaggccagataacataaccttcaaataacctctaaccagtttttatatgctaaacaagaagtgtaaccccccagtaacaaaggataataacctccccctaattgcgggtacacttcttgtttagtatatattaataatatatactctacgtcctcctcgtcgtcgaccagttagttagtactattcgctcatgaatcatgcggcttcgccgcgattcgagcgaatagtact

SEQ ID NO: 152 - DNA, 5759 bp, Culex pipiens densovirus
  source 1..5759: mol_type = genomic DNA; note = Culex pipiens densovirus - NC_012685
ggtacccctttgtaggccgtacttataagaataccggtattttcggggcctacaaaggggtacccaattgtaggtaaaatttccacagactttcccccacccataagaaatacatggcagtacccctgtagggggtgggttgtaggtcgttgatgtagtagaactccttaagagttaggtcaagtactcagaatgtatagtgttcacgcgatgacgtcataggaccatgactcacctctcccatcgttcgtgcctctctctgtgagcctcggttcgtgcattggtcaaacatgtttaatcatgaaaccggttttttcaaaccttacggggaacattggtctgaattggctgatgcaataacctgttttattgtgtattgcttggtatataaggtggttgtcgcctgctgtagttcatcagtcttgtggcaaccgtcatggaagtaccatctctcttcgatcagtgtttaaaaaagtgtgtatttagtgatataaaagtggaagaatatttaaaaaactatagtttaccaatatttgctgaagttaaaactttatatctttctcaacgattttgttggggacaattatataatatccctagtattggcatcttgtacgatattcctcatgcgtttacaacagatgaaaagtgtttgtgtatagaaagaaataacaaagtaaaatattacggacaatatagttgtactcctttgtatacaaatttcgatataccagaaaaaaacgaagattacagtaaaataatatataatggacaaactgatgtgcagagaaaaaattaaatacgttgtaccaagtctacaagaaatagccggagctgaattattgaatagtggtagtgtgcctaaagaatatttaaaagtgttgtataaatttgattttcctgttcatacgattcaacaaaatcgctggtatcgaaaaggcttttacggcgattttacttcaaacgttccggtgccgtttaataaagctataaataatccaacagtaatagctgtattcccctggaatcgcgacgaaatttgtcagtacaagtttgatgttgaacaacgacggatcagaagtattaagcgcagactccaattttaaaaatggaattcaaacagatattagaaactatctggaattcccactcagcccagcaaccatgtcatttagtgggttggtggatgggaatacttcaagaagtgaaggagaatattccagaggatcatggccctcaatggcacaatttgctaggcaagctggagaagcttacgaagatttggcaaaagaaatcgaagaaatgggagatatcttcattcgatacgttactggaaaaaacatcaaaaatacctggagatatcttagcgacgtgtttttcccaagaggagagtcaaatgctaatttcgctatggaaagattgcgtgaatatggcagatctagacgagacagaatgtttggctttatcaatgaaggagatcacatccacatcatccacgattgtgcctattccggaggacattgccgggacgtcttccgaaagcacttggaaccttatggatcatttggcccagctaggccagaaaacaaaccaatctggaaattcaccaccacggactggtatgatgtcttccagtatttctttcttagaaaactcagaaatgggaacgacacaggcgaaatatacattggaggagaaagttggaaaaaaccgagtaacggtaagtgtttattacttttgtatggctataactaaagtaatattcatttacagatcaactggtacgatgggaaaaaaagcttggaacttggcgaccgttggtacgacagcaagataatggggatcacctgctcgatcaacgatccggtctcaaaagatctaatcgagaagttgctgggacacctttcgatgaagtttatggcaaaaaaaccaaatcgtcaggaaaatatgcagctattaaacaggaaacgaaagcgttattattaaaatattatccatgtccattaagcgctatacgcgatgtcagtgaatttagaaataacaatttattatcagatcctaaaaatcgtgaatatatagatgcagcttttgtagattttggtaaagatgttaatcaaatgactatacgacagatttatgagatattaaaaggtcatactgatcctatattttatgcaggaatggaatatgctactcaggaagaatcgtttgctatattagaagactttttaaaatttcaatttgaggataacgacgaaaaaatcactcaatttttagtagatttaattgatgtacttgataaacgagttccaaaacaaaatgcttttgcagtaatttcgccacctagttcaggcaaaaattttttctttgacatgattatggcaatttgtttaaactatggacaattaggacaagcaaacagacataatttgtttgcatttcaagaagctcccaataaaagattattactttggaatgaaccaaactatgaaagcgcaatgacagatacaataaaaatgatgatgggcggagatccatatactgtaagagtaaaatatcaaggagatacacatgtaaccagaactcccgtcttaatacttaccaataattatgtttcatttcttcaagaatctgcgtttaaagatagaattaaagtgtataaatggagagaagcaccatttcttaaagatgttcatgtaaaaccttatcctatggctttctttgatatactaaataaatacaacattcaattttaaatcgtttattatgttgctcgtggtaaaatatcacctgaaaatgtcttatacaatcctgcgtatggggcatggtcgttctcgggatcaatataattttgaggaatttcattacttggtagtgaaataacaacttctcctggaggaacattgggtacattagcataaggaaattctgttggagtatgttcaacgacattcattgtagcaattacttcccaataagctcttgtgtctgtccaattatcaaatactccttcttctaagatcaatgctccactagacaaagctggtactggttgtacaccaatatgcatagatggcataatatgaggatcttgtgctccccaaaatccactgcgtgcaatttgagacttttcaataggagtatatatgtcataatcatctactactggaaacgtgccatcattatcattgcttaaattaataagaacttcagaagtttgcaatctatcgccattaataccgggcgtagtttcagatccagcagtgtctttcataatgtgtgcacttctagcagctacaagatttccttgggttacaatagtcatagtaccacctgcatttggctgtggcaaaccacgtccaaaagattttagtggatttttaatcattcccattctaggagaataagtcgaagataaaactacttgattaacacaagtttttccatccatctgttgtatatgtttggctaagcatacccaacctccccaggaattagttgtagcaccgtctgtgtcagttgccgcttcatcactaagtgcgtgataattatatatattacactgcctaccaacatgatgttttggaatatatgaagcaaaactaggatgattattattcgttccgtaaaaatctgctaccattcctctatattttcctggaattggtttatatctcggctttgcaattttactaggaatcataggtttaccagcagtaaattcagtaaaggaaacattagatccataccctgtcttattcaaagctgtagcaacagctatatcattaatctgattaagagtagctagcgatgtagcagatgatgctgtttcgaattgaatagttgaccctctataaataacctgaatagatacatcctttactcttgatccaattggcatcagattaaactcggacggagttaaataaaaacatggtaaatgccatggaacttctgccagataagttgtcaaccatcttgaattactattggaatctgatgttattatttttggagcaaatccgaaagtcataaatttatgaactttacgatatgtactaattttagaaccaaaaagtgaaattggacgttcaatatgatattctgctaatccatctgaagacgctcctcccgaagcttgttccttgcccgtaccagtaagcgtcattcctgcgtctgctgacgacggccctgggatttgggtaatagcctgttttgcaggtgtacctcctgtggatgaatctgcaactcctcgtttcggtggggccataggcggataaataatattaccagttgctttttctgccaagtgttttattccgattcctgcaccagtaacaattcctccaagagtttgactaatagaacctttaccagcgattccttcagccacgtaatttccggcctccgtaagaaattgtctatccgctttgtgtatatcttctggagattttgctttatcgtaagcaatatcgtgttgtctcgctgattcgtcgaccaaatcgtaggcaggtcctctattaagactgtttcctggtcctgcgtatttatatggagcgggtaccaagccagccctttcaccttcaatattctgttgttcaataggaacaatatctacgtcgccgtgttgatcttccaaagtttctagatcaaatttttctttttccaatgctttaacagcttttttatgttctcgttctactttacgtaatgttattttgggtttagactttagcaaatgttcataaatctcatatgctccataaccaagtccagctaaacctccaacccacaagccgactggggctagcggtgttaaatccaacgatgcagcagcttcttctatcgatgcaaacaaaccttcagcagctacttcttctgcttcttcgacttcaaacgtttccaataaaggagttctttcagagaaaggtatacgacgacgaagtgttgaagacatactgtttacaatgtgttttatttccattaaatataaacgtataatctttaaatgtattgatgactatataagtcataacagtcttgaatatatacttcaatatacatttacacaaatacttttgcacaaaatatgcacctagctgttttttttgattcattggtaatagtgtactctaatataatacagctttgatgtaaagtttttacaaccaataaaaacttgataactttcgcctgttacgtcgtttacgatgtacatccactttgcaccagcattagctaccattgcaggttgacctgtcaaagtgacccatgtagatggattaatgattacagcatttcctacaacggttccaggagaagctccagtggttaatgaatcatggatatatctaaacgatccagttccattattccatttaatactcaggattcctgtatcgttcacagcaaaagatacatttccaattactaaatggggagttgttacaattaccggagcagtaaatgaaacattcgttctgtatgaacccatgattaaaactaaccaatgcacgaaccgaggctcacagagagaggcacgaacgatgggagaggtgagtcatggtcctatgacgtcatcgcgtgaacactatacattctgagtacttgacctaactcttaaggagttctactacatcaacgacctacaacccaccccctacaggggtactgccatgtatttcttatgggtgggggaaagtctgtggaaattttacctacaattgggtacccctttgtaggccccgaaaataccggta

SEQ ID NO: 153 - DNA, 5006 bp, Danaus plexippus plexippus iteravirus
  source 1..5006: mol_type = genomic DNA; note = Danaus plexippus plexippus iteravirus - NC_023842
ttctctcaatatataccaccacaaccccccgtaacacaagcccatatatccaattacgatgaccacgacgcgcgaagcgcgtcacttcgtgtggtcactacgtatcgtaattggatatatgggcttgtgttacggggggttgtggtggtatatattgagagaattttttctagtcttggcggttcaaaccagatgatgacgtcacaatggcctatgtgacttggtgtacatgacttaaaggtaaacaaactggagtacgtgagataatgtaatgaggtggtggtgataatataataatagagatatgataaacagataaagatagatataaatagggtataagaggcggtacactaaacatgtcaattcagtctggcagttacgagcactcatacgaggaccatacttacccggatttggatcatacattgcagctacgttgcttcaggtacgatagtgaagacgaatatactcacctgtttgataatgctaatactactggtgaactcttgtctgctatggagtcttttgaagagccttcagatgaaattccaagtgaagcagcgacaggagcacttgaagaaattagaagtcgtaatcaactcggtaacacaagattgggaagacatgctgaaagaacactcaaccgaagaagaaatgatagaatacttaaccgaggaattctcagcttttattcaaaaagattgcaaaaacgactcgttggaaaccttgtacgaaacagtggaagaacccaaattagttcaatccagcctagccacgatgaagtactacttaacgctcaccttgcaaaacaaagccaaggaaactacgggcttgaaaggccattccctgtcagttatcagcaaatggaactctgtcataaagacgcctttgaaactcctatcgaacgagaaagaagcctccaccaattctttcgagcggtggaacgaagaatgggaatcctcgcagatcagttatgtagagcttctgaggataatacagttaatgcaagaagaattctacacgactccattgagctccgaagaaaccaaaactttcgtgaaatggtttttggcatcaggaaagtccttgataaaagaggttcgtacgctatatggttccatgaaacagacaaaggaacggaagactacccagaagacatctgtagaggataccccccagactacgactttggagtcatatcaactggattccgatacagcggaaagccagcaatcgagccaatcggaagaggagagcgaggaagagattcccctgacccaagaatcaaattcaagatatacaagtactacccagaaacgaaaatctaccacgacacacaaagggaaatttaccaagaagaagattttgacgaaccaaccgaaggccatttccacatacttcacgcatgccaatggtacaacaatgaatgcagatgccttgggaggagctttgacgtcaatccaaggaagaataaggcaatccctatcgacccggttgacactgaacacatacgcaacatcatgttctataacacaaaatggcccagatggcctgtgtacatcaaagtggccgacggacccgaattcgaatatgtttatagaactgaatctatttccaaagaatcaatacaacccgagcgacagtcgcaacaattggaagagagcaacgatcaggatgaaagtggaccttccggacgacagccgcccagcttaccaactaaaagagataatagatgcacagatgtcccgcatggaaaatcatccagaaacggaaacccagtcgaaaagttcgtggaacaattcaaactcaggccaacatggcccctggaacacatactagacacaaaggattggctagaaagtgaatggggtacgtacatagcaagtgacaaacaaatacaaagaacattccaaatacttatgaaaataacaatgaatatgacctatgatgaactaaaaatgctataccaaaatgaacacactatgcctatatggggcgctataagtagtaaagatttactaaatacttactacacattggatgaaccccaggatattgtagaggaattactagacttccaaatgcataatgatcagttggagtattttgacagcctggaagatgcaaaacgtaagtttattacagacctttatgaaatactggaaaagaaacaccagaaaacaaatacattccaaatagttagtcctcctagtgctggtaagaacttttttatagaaacagtacttgccttttactggaatacaggagtcatacaaaactttaatcggtataacaactttcctttaatggaagctgtaaataggagagtgaattactgggatgaaccaaacttcgaaccagatgccacagaaacactaaagaagctatttgcgggcacagcacttaaagctacagtcaagttccaaaaggaagccaacgttcagaagacacctgttataattacggcaaattatgacaagttcactaaagaagtgtgggatgatcgtataattaaatattattggtacccttgtcctaaacttaaacaatataataagcgtttacatccttttgtttggtgttatctagttgataaatatgtaatcgatttgtaatctaatcaaaatgtataaatataggtgatggtattaaataaactcagtattattccatatgcctcgtattcattttccttatcataattatcttggtccgggtagtgataactttaatcaacaaccagtagacgaggacgacgctatcgccagatcacatgacctggactacaataaagcaagctctgataacgacattttcaaagctgataagcaggctcgcgacgagtttttctcttcatttgtgcacagtggaaacgtgcatagtttaattggaggcttaggacttggtggtaaaaacctaatagaagaacatgtattaggtaagtccgtgtacggcatgggtaaaagaaaatctactgaaaaagattgggcaaagattaaacgtatcaatagagcgagaacagctagacgagaaaacgaagagaaccaaccggatattagaaattttggacacgttgctggtgagaatattaacccagacgcagaagtaaatctagcagactttccagactttttacaagactttgtagcagaagcaggacctagtggaacacagcctatagagtctgcacaagaattaccaccaatgtctcaagatgaagttcccatggatacggcaggagccacagacgttggaggaggagcgcaagttgatccgcgtagtggaggccaaacagctggaggcatgggagcaggtggtgcagcgaacgatggaaggcaagacatatacgcaggagcccctcaaccgaaccaacaccatgaactagtttatggaaagtcataccatttcacactaactaatggactaccagatttccgtcacgctctagttcagacaaaccattatgtagctgaacaaaggtttaagcatatacatggcataccttgggaaagactactaatgtatatcagcgaaggagaactagtgcgcttatttcgagattatacagctgtaaaagtagaagaagtggtttgtgaagtttacagtttgggtgtacgtttaccatttgtaacttctgctacaaccagcagtgtagctaatgccaatgctcaatatcctataggatgctttcattttgacaaagcctaccaaacgcaatacgattcaacaaacgtacaagacataattaacaaggcattgggttctgaatggaaaaactttaacagaccttcacaacctgttactactgaatggtcagaaaactttccaaatattagtgcatcgactaccagccgtgacataaataacccagttatcgttgtatatcctattccatatggccaaactaacgtgccaaaagatgtaggagtatatgattatgtggatattaaaaatggtaccacagcttatggcaaatgttgggaaaagagattcaaacctaaaaacggaataatttacgcggagagtacattactaggagcttctggtacatcatctccagaaacagccggatatccttttatgacacctatccctggactggaaaatggatactttatgacagcaaatgacattacagaacgtaataatgcacaaataagacccatacccaaagctttaactgctactaaaaataacattacgataacaaaagtattccaagctaaagtggattacatggggtataattactttggagaacagaaaacggcaccacaggctatgcctaaatttatgattggatttgttaatatccgtaacgaagacaattccctgttaactgctaaatgggacattatggtcaaaacacgcattcgtctatctggactgcaagctactcgggactgggttgcacgtacggaaactataccaccacaatggttcacgtctcaatacacccaattccgttatgaagacatacatgcacctccaatggaaagatcaggtggattaactactgttccttcacacagacctctatttgcactaacctataatccaaacagagctggaactactactgaagaaactaatactggaaatgacgaagagttcgttaggggtcaacgtaaacttagacataagtcagcattgttacctttaattgaaaaacctgtaactcgctctaagaaacttttaaaacaataaatatctcatatcattatctatatcttttactactaccaccacctaaaataataataatttaagtcacgtacaccaagtcacgtaggccattgtgacgtcatcatctggtttgaaccgccaagactagaaaaaattctctcaatatataccaccacaaccccccgtaacacaagcccatatatccaattacgatacgtagtgaccacacgaagtgacgcgcttcgcgcgtcgtggtcatcgtaattggatatatgggcttgtgttacggggggttgtggtggtatatattgagagaa

SEQ ID NO: 154 - DNA, 3909 bp, Decapod penstyldensovirus 1
  source 1..3909: mol_type = genomic DNA; note = Decapod penstyldensovirus 1 - NC_002190
tagagcgcgaagcgcgagtatccatcatttaaattagtggtatgacgtcacatattaagttaacggtttctgcgaagcgcttcgcaggaaaccgttacaacctatgacgtcataggtcctatataagagatgacggactcaccggtctcccagtttctaactgacgagtgaagaggctattccaagtgactaaggacaattttggaacatggaagatacgaacgaccacccatggcaatcaatacctagtccgtcattatttggatcatcaagtaacagtgaaccaacagaagtctttcaaaacgtcttcggggaaagacaaacccaaggatacaaatgtaagtacaagtgactgactaagtgacgatccattaaattcctaattgacgcaagtgacgacgtcatatgcgtcacttacaaaagacgtaaccgctttcgtccatcactcacatatatctttctctacctttcagacgacataccccaacaaatatcgctgcgctactgcccagatcacattctaccgtggtgcttcatagggaacagacccgttctctactgcctctgcaacgagtgttttatagacaatctcaatgtcaacggacagtgtcaacactgtcatcccgacgacgaagaatggacagaaaatatggccaaggacatactgcatacacgtcagggcgaaccagaatcacttagtgaattgcttcgagaacgcacgaacgaaactcactccagccagggaatttctccaagccttctcaccccaggtccaaatcaagaccctaaacccactaccgaacaacttcttaatatgtctgaagaactgttccagttttcagacgaggaagacaactctcaaactcctccaagaacttcaacaccagaacaaactgatcctaaggtctgcgtggataacctgggaattcgagagggaacaggaaacggaacaattcaacttggaagtgaatcagaaacctcccttggaagtgttggaaacagtaatgacaggggtaaaaagagacagagaggaattacttacatcagtgacacatcagattcctccggatcagatgacgaaaatctgggtacaccacatcgaaataaaagaaccagaaactccaacaccacaaaagagacaggcggaggagacaaccgacgacatcaggaaagcgatcatggaagcaatggaaatcgactggaacctaccgatggaggagagagctgtagtagcggaacacaacccgactttattgaagggactcccaacggaccggacgaaatggacggaaggcgactggaagagagtgagattgataaacaagtggaaagtacaacatggtacaccttcgtcatcagagaaaaaccacaaccaagaagactctccggacgaacgccaaacttcaccattacagatcatggtgaccactggcacatcacatactccggacacccaaccaataagaccagacatagagctacaatcctcgcctatttgggagttacctttgctgccagagccgaagctgaagcgactacggtacttgttagaaatatcaagagatggatactctatcttatcagatacggtattgaacggctttcgtattttggtcttggccacgccatttttaaacgaatcatcaaatacttccaacaatacagaagagacgaagacgcagtagacggaccatgtccatatatgactactacaagagaagaccgcgctgaagaaaaacctaaagaaaacagtgcagaatatgactacctccaacacttagtcaaaaccaagtcagcaagaacagtacaagaacttgtcaataaacttgacgatgaagaatataaacaactatggacccgtaccagaggacaatataaagacaaactcagaggaatattaacatactacaacaacaagaaaaagtcaaaccaaagccaactgtcactaattacaaacctgcagaatatatccaaaagaaaaccagactacgacaatatgcagtggataaaatacatgttagccaacaacgacatccgtgtaccagaaatcttagcttggataatcatcgtagcagacaaaaaactggacaaaataaacactcttgtactccaaggaccaacaggaacaggaaaatctcttaccatcggtgcactactcggaaaactgaacactggcctagtaacaagaacaggagactcaaacaccttccatctacaaaacctcatcggaaagtcctacgctctcttcgaagaacccagaatcagtcaaataacagtggacgacttcaaactccttttcgaaggatcagacttagaagtaaacataaaacaccaagagtcagaaattatgggacgaataccaatcttcatatcaacaaacaaagatatagactactgggtacctccagctgatggtaaagctctacaaacaagaacaaaaaccttccacctgacaagacaaataaaaggcctctcagacaggatgaacagccagtacgacatcaaccctccaccagacaagatcaccagcgacgacttcctaggactcttccaagaatacgaaaaggaaatcgacgacatcatagacaaccatgtgcgccgattcaacaagagcaagcccaaggaaaagatccaggagggatgcacataatgaagacgaagaacacgccgaaggatcaagtggaccagacccacacagatgtctacaattcaatactggagactcaatacatattactttccaaacaagaagatacttcgaattcgacgctgccaatgatggaaacttcgacggaaaaaatttatactgcctcccactacattggatgaacttatatctctatggtctaaagagcagcgacagttcagcaacagaaacacaacgatataagatggtaaaatcaatgatgaagacctacggatggaaagtacataaagcaggcgtagtgatgcactcgatggtaccccttatgaaagacttaaaagtatcaggaggcacatcatttgagactctcacatttacagacaccccatatttagaaatatttaaggatactactggactacataatcaactatcaactaaggaagccgacgtaacattggcaaaatggatacaaaatccccaacttgtgaccgtacaatcaacagcagcaaactatgaagacccaatccaacaatttggattcatggaacaaatgcgaaccggtgacagaaaagcctatacaatccatggtgacactagaaattggtatggcggagaaataccaacaaccggacccaccttcatcccaaaatggggtggtcaattaaaatgggacaaaccatcccttggaaacctagtctacccagcagaccaccatacaaacgactggcaacagatcttcatgagaatgtcaccaatcaaaggaccaaatggagacgaacttaaacttggctgcagagtacaagccgacttcttcctacacctagaagtacgactcccaccacaaggatgtgtcgcaagtttggggatgttacaatatcttcacgcaccatgtactggacaacttaacaaatgttatattatgcatactaactaaatatattcgatgtgcaatatatacccgattatatccagcttttaccaataaacatatatagcttattatcatctatacctaccctatatacataccagctacccaggcaaggtgggactccggctacccaggcatggtgggacacttttcttctattgacgacatatttcgtcacttacgtcacttacaaaagactaaaatccctatcgtcagtcagtcatttagagtcagggatattgtccgccgtcacttagagcgcgaagcgcgagtatccatcatttaaattagtggtatgacgtcacatattaagttaacggtttctgcgaag

SEQ ID NO: 155 - DNA, 5039 bp, Dendrolimus punctatus densovirus
  source 1..5039: mol_type = genomic DNA; note = Dendrolimus punctatus densovirus - NC_006555
tatttgcgattttaccacaccctacacccccagtactggcccgtagcttcgctgtgtggtacgaagtgccgcttcgcggcaccacacacgggccagtactgggggtgtagggtgtggtaaaatcgcaaataatttcgcatctgcgcagtttataagtaggtagtaacagagcatgcatgataaataggtggtggcgtgatcgaatgacgcaaatcattgacctcgaatgcttttagtgccgtgtgcaacaataacaagataataaataaagataaagataaagatagagagtataaatacatatgggagtggaaatattctataatcatgaacgcgcagtcaacaagtgaacaagtaataataagtgaagatataaatccagactcagtctacgcagtgctgccaaacggtatagacgtacatcacgctccttacacctgtaatcagaaccagtgtcacaatttaacgtcgcagcaaataataaatattgaaaatgttccaactgatcgccaacaaaggtctattgaccggaataatgaaatcgttagtgtctatgaagatagtgccctcactgcaaacgaagagtttaataacgacggcttggacggagactcaggagaagattcaatatctagaagagaagataaagtcagtgcaagaggactcctcgccactgcagaatatactatacgaaattcctcaattaagcgaattattagaggaaggtttctccgaccagattgcggattatcatttccaattaataattgtagaactgtccaaatggttaataacgcaatggtcgctagagccagaaacgatggaaacagatccacagttggaatgcctccaatctctatggaactctgcaatggaaatgtctatggtaactcctataatactgaaggaatcttccgccaattttatcaatgtgttaaaagaagaatggaacgactcggagctgacttatatgaaacttttagaaacaatagccgagggacccgacgcatacttcacgatagcattgaatacgaagaatcaagacatggatgctttaatacaatggtggaaaaactcatcgaacgccttgacaaaggaaatggatgcgctattttcttccatgaatcgcctgaccaaaaaggcgaatggccatacccagaaaacatctcaagaggatactacccagatttcgacttctgtgtcttcaaaaacgacgaagtgtggaacggaaagcttgcccaagaacccacggaagaggatagcagtgacggaagagagttcggaggacgaagatggctcgacctcgaagaatacacctactttcatgactccaaaatcaaaaaagtcaacgaagttggaaaaagctggccgttcgaaaggtcagaccttactccctttccagtaccagtcaaagggcacttccacgtcttacatgcctgtacttggtacaaccaagaatgtcggtgcctctcaaggcattttgacgtcaatccgagaaagaacaatgctctgcgaagcgaatgcattagcgcagaacatattagaaacatcctgctctataacacaaaatggccgagatgggcaatttacattaaagtgtccaacgaagaaaaattccgatttgtttatagaactgaatctgtacgagaagaagaactacgacccatcgaacaaaatgaactggaagggagctctagtccgcttgaaattcgacgtaaaagagaccgagagggaagctcagatggtgaacatgattgtggacgcccaaactacaagaattcaagatcatcccaaaagggagacagtgtacaaaagatcatccgatttatacaacaaaaaccaacatggccattagaacatgtgtttcaaacaaaggaatggcttgatggtcctttcggtacatgggttagcagtgataaaacagtgaaacgcgctattgaaatattttctttgcaaactatgcattatacttatacacaatttgtagattactatagaagcctagaatgtaatcctatatgggctgctcctagttttaatgggtttacggattattaccacacactagacgaatctattgacattatagaacgtttactaaactaccaatgtgaacaagacgaatacctttctgaaatgtctcaaaacgatgctaaaaaagtatttatcaacgatttatgggatattttggaaaaaaaacgtcctaaacaaaatacctttcaaattataggtgagcctagtgctggtaaaaattattttatagacgctatattgtccttttatttgaatactggaattatattaaactttaatagatttagtcaatttccacttatggaagctgttaatagacgtgtaaatgtatggaatgaacctaattttgaacctgcagctttagacaccataaaaatgttgttagctggtgatcctttaaaagtaaatgtaaaatatcaaaaagaacaatatttgcaaaaaactcctataattgtaatgacaaacaaacctgtatttccaaacgatttagcttttcatgatcgtgtatgtacctatttttggaaacgagcgccatttttaaaagaatatcatgccaaattgcaccctatgatatggtcataccttgtaaatacatatgtacttgaatctattgacatgtaatctaatctgtttatgtaatctaatctatttgtgtaatccaagattataaataaaggtgttaaaaaattacgcattcagttttattccacatgccgcacttgccgggtcataaatatattggtcccggtactagtgactttaaacctatacctatagatagtgacgacgctatagctagagaacacgacttagcttatttaaatgctgataataacaaagacatctacaaggcagacaaaacagcacgagacgaatttttcagtgattttgtacataataacaactatcatagtttaattggtggtattggacttggtgctaaaaacctaatagaagaacatgtactaggtaattcattatacggcatgggaaaaagaaaaaatactgagaaagattgggctacaattaaacgtattaatagagcacgagcagcacgaagagaaagagaaaacgatctaaatcaaccagacattagaaattttggacacgtagctggagagaatataaacccagacgaagaagtaaatttggctgactttccagactttcttcaagatttcgtagcagaagcaggaccgagtggcactcaacctttagaaacagcgcaagagtcaccacccgtaatgtctcaagaaaacgtaccaatggatacagaaggagcgacagatgttggaggaggagctcaagttgatccacgtagtggaggacaagcagctggaggtatgggaggaggtggagcagccaatgatgggagacaagacatatttgcaggagcacctcaaccaaatcaaaatcacgagctcatttatggcaaaagttatcattttacacttactaatggtttacccgattttagacatgccattactaacaatgcctacagtgcacaattacgattcaaacatattcatggtataccatgggaaagattattaatgtatgtaagtgaaggtgaattattacgattaatgcgagactacacagccttaaaagttgaagaagttgtatgtgaagtatacagcttgggagtacgtttaccatttgtgacatcagctactaccagttctgtagcaaatgctaatgctcaatatccaataggttgttttcattttgataatgcatatgaaatacagtatgacgccactcaagtcaatgatgtaattaataaagcattaggtgctgaatggaagaattccactcgcccagatacacctgtatccactcaatggtctgaaacatttcctaatataagcgcttcaagtactagtcgtgatatttctaatcctgtaattgttaattatccccttccatttggtgttacaaatgttcctaaagatgtaggaatatatgactatgttgaaataaaaaatggaactacagcttatggaaaatgctgggaaaaaagatttaaaccaaaaaatggcatattatacgctgaaagtacactattaacaagtggtaccaatgtaagtattgaaaacccaaatgtattaatgatacctattcctggactggagaatggttattttatgaataataacaaaatttttgaaagagacgatgcacaattgagaacacccccaaaggcatattcagctacaaaatataatcgtaatcgaggaataattaacgaaaccgatgtagactatatgggttatcattattttggagaacaaaaatgtgcaccacaagctatgccaaaatttatgattggatttgtcaatattcgtaatgaagacaacagtttattacaagcaaaatgggacattgttgttaaaactagaattcgtttatctggtttacaatctacaagagaatggatttcaagaactgaaactataccaccacaatggtttacttcgcaatattctcaattccgatttgacaatcctttcaatttcccactattgaatacatcgaatattgttaaagttccaacaaatagacccggcatgttttctccaaatacacccggtagaagtaatgaagaactaaatgaaaaagctattaaggatcaaaaatctttacgtcataaatctgcattgttaccattacttgaaaaacctgtaactcgctcttctaaattaaataaataaaaatgtaaaataaattaatattcaataaatatatcttatctatatcctctttcatttacctatatctatatataatataataaaacaaatcacgccaccacctatttatcatgcatgctctgttactacctacttataaactgcgcagatgcgaaattatttgcgattttaccacaccctacacccccagtactggcccgtgtgtggtgccgcgaagcggcacttcgtaccacacagcgaagttacgggccagtactgggggtgtagggtgtggtaaaatcgcaaata

SEQ ID NO: 156 - DNA, 5071 bp, Diaphorina citri densovirus
  source 1..5071: mol_type = genomic DNA; note = Diaphorina citri densovirus - NC_030296
agtacttttggagtggttctttcactccaaactctttctagaatgcagcaccgacaacagcagcatgagacctagattttccttgattttcccgtgcaccggccgaaggcctaggtaagcacctgggaggaaaatctaggtctcatgctgctgttgtcggtgctgcattctagaaagagtttggagtgaaagaaccactccaaaagtactttgcgtgtttatctctgatgtcattggtgataaagtctctaacgatgcgaactataaatagaggcgtttctgttgtgtagatcttcagtatggattgttcagcggacggaaaatttaaacgtttggattgtttgtgttacttttgtttacttccaaaattgccaacaccagtagtgagtatagttccgacgatgagttcgaacgaggattcgtgtcaatctctaaacggcgaggatccgttgagttcggctccagcgagtccggcgacgagtcaacatgggcacaatttaagcgattccgaggagacgaattgtaccgtcgtattggcacagaatcccctgcccgatacacaagaagtcgagtcaatgttccaagaggatcaccggaacgtgtcagtacatttcgcggaagagacagtgactccggctcggaagaagaaatctatactgaaacggacgatgaaaaagaaaacaactcccaaagtgaccacggcgaagaagatgttgacactgactcatcagcaacagatatcagtgtgggaacggcaaaccaacaactttatggcgttcctgtttctcgtctggactcctatgcagaccgttcaccttctccaggaccttctactgcatatcgctattgtagcgaggaaaacccaaaatgtggacctaaaaaagcagtgcatccgttggggggaaggcttggcgatcgtcaagcaaaagctaggagccaattacgaaacagcatcgtgggcctccttcagcgagtgcctccgaagtctcgcatcttacacgacatttatctgctacccgattcccaaagaaatatggagcatcttgatcgagcgatacgaggagcttgccgcaactacacaagcggtaaccgacaagcagctcttcagtttgtctgtttccacaaaacccacctccacgtcgtgcacgactgtacctacacttcttccacgtgcagatgtgccttcacccggaacatccaagacgagctcggcgtgcgctacaccaaacggtgggttattcgacaatatagattcggatcagaacgggtctacaataccttgctctatttccaaaaaactgggcgacaagctctgtacattcaaatcggagggcgcatttggagacacggttgtgaaattggacctaatcccctattcggcggcggcgacaaagtccaagaaggattggtggagcgaggcgagtttgcggacaacggtgacctttcagcagaattcggcattggcgattgcgaccgaggcctacacgaaagcaatcatggaccacttccagagtcaacaagtgggaccactgtcgaaagatactcactaccaaaggcaatcctcgtttggttacggcaacatccagccgcgccgctgacatccatactccaaactcgtcactggtcggagtcgaaattcggtacgaaagtactacggaccgcgcccctactcaccaatctcttcaacaattacgcccttgaactcatggatgcttccatggtcgaacttttcgaacgctattcatcactcgagcatacgaatttaatttttgccgctccactcggtaacattcaggaaacctactatacgttggacgagtccgttgtaattttggaaaaattgctactctatcagtatcgtgatgatacggaaattgtggaaatttttctccaggatctatatgacgtactcgaaaaacgtatagctaaaaaaaataccttttttgttctctccccatcgaatgctggcaaaaattttttcttcgattgcattgtacatttttatttgaatttcggtctgatcggtaattttaataagtaccaaaatttccctttacaagagtgtgttcacaaacgtattcttctgtggaacgaaccacaagctgagcctagtgcttttgaaactctgaaaacgttactcggaggcgatcagaccgtagttcgagtgaaatatcaaggtgatgcaacggtgggtcgaacaccggttattattctctcaaatcacaacatttttcccaacgacgctgcattcgtcaatcgtatgtttgtatacgaatggcgaactgctccgtatttggcacaatatcgcaaaaaaccacaccctatggctacatacttgctttttaaaaaatataaaataatcaaaccagaaatgtaatcaatacaatatcaaatttattgtttacaatacttcgaattctctaattagttctgcttctttagttctctctgccaattttttttccagccttgcagaagtactcgaagacttcttatttgtggtaaccttaatagaacccccatctccatcccacataccgaacactgagtgcggttgttcgtaatagtagttggcatgagaagaaaacagagcatctgtttcaggctgggtaggttttccggtccattccgtcgttcgacgagactctaattcgatggaacaatctacagcatagtagacacaacaattaacaaaattcttatgttcggtagctggattcaattggggtatagcgcttaaacctatgtgcacttggggttggacattttgacggggattcaatgccccataacgtggagcaaaaataccgtatttttcgatttgagaatgatagaaaaatttactcttcgccatatgatgtttaacaaggggctctttttgcgttagtttatattctttggtgctgacgtcacatgtggcatctacaatattcatagcgttcatcattagaccgtccgaggcgcgatgatagggaatacacagaggatccggttctttaataacgcccatgtgaggttcatattcatagtccacaacagtttcaccaactgtggaatgtagaagatgacttttgacgaatttgtcgagtcggaaattacccgcgtcgtgtagtaatacatctttctttgtggcatcatcccagtcgggtttcgccatggaggtgttcctatagggtacagcgtacaccgaattcgaacggggaacacacgtcacaccggacgcagggtccacgtaccatttgtccatgtagtcggtgagactgatatcttcgagaccggtgggtatcatgggcgccgtcgactccgatttgatttttttgttcataatgtgcacgttgttgttcaaaccaatagcggttaacaatatgggacaatattccgaggtggccactccagttacagtggccccaatatcgaaccctgaacgtacacctagcacacgaacctgacatgttacacgcttaacccaagtgttcggtggcacagtggcgtattccgcagagtccaaatagaacgggagatagtcgacgggaataaaagatagaggtgtaactgtgcccaggagactttgcttggtgtccaaatacgatgttacttgactgtaaccatacgaataccaaatacgcgatttgctaaacgacgccgtccattgttgagaaccgtgggaattattcaagggaacagcacttggtcctcctcctcggctagttcggggttgttgtccactgcctcccgtaggcgggtccccatactgggtagtatccatacgctcatccgcaggcatagtttcactgtttgtatcgctgcgaggtaacttactagcagaaggattatccaaattagggtcgttattttccgaatttgaaactcctcgcttgcgtgtagctgattcagaagctgggtttgctgtgcttgattctgtaagatttccaggagcggatcgtccatactccgtgtcgtgcaaacggtcacattcggcgcttgtattttcacgaacgcgaacagcgtcttcggaagcacaccagagagcgtacggcaatgtagacccggagcgtttgtattcggcagataaagcacgttgcacaacactgtaccggtattgatagtattccttcggacgtttaactgtaggctttggacccgggggtttacgcttcctcggtgccatcgttgttcttcttacgttttataccggccatggccgaacgttgcgcagtactagcacgtaatttggaaggcgctggatacacagttcccgtaacggattcgagtaacgatttcaaaccgagtcctgtgtaaccgacaagcgaactaaactccgtaggatgctcgagaaactgatgacgagcctctgcatctgcttcttttatatgatcctctgtccaggcatgcgcataagcataatcgtgctgttgcgcaactttatcggcgttcgttgtaggttctccgttgtcgagaggattgccaggccccatataattatgcccgggccacaaaaaaccgccacgtcgacgtcgttgttgttgcgtgctagcacgatgtaatcccattaaaacatatggtcctttattcgtttgccacgttttgtatcgcttatccggaacactatacggattcaccagagacgatgttgtagacattgttgtaacactcccgaatgccactggtttttctacgcgttttacatttgtttttttcggtttggccttgccgctggagggtttttttatcgcttttatctgagcactattatttacagatgacatgtttaagcacacaagccaactcactaatgagtcctcgaggctaacaaatatattgcgttatcacacgccacgaccttgagatgacaaatacatggagtacttttggagtggttctttcactccaaactctttctagaatgcagcaccgacaacagcagcatgagacctagattttcctcccaggtgcttacctaggccttcggccggtgcacgggaaaatcaaggaaaatctaggtctcatgctgctgttgtcggtgctgcattctagaaagagtttggagtgaaagaaccactccaaaagtact

SEQ ID NO: 157 - DNA, 5941 bp, Diatraea saccharalis densovirus
  source 1..5941: mol_type = genomic DNA; note = Diatraea saccharalis densovirus - NC_001899
tctactgacctgatgatggagaggatccgaagaccttggagctgatggtggaacaccagtacctgatgttagtaaaggatagcaatagtgtgtaagtgtgacagcaacatagcaactgttagaaagagacagcaacatgagtgaaagagatagcatgaaaacaaaccttgaaataatttatgcgtaattttattatcttgttattgtgacctcgcttgaccgcaaactcccgtcgaagctggagccgtgtgcaaaacaggatgtagctaggcagcggaccgtctcttagagtatcgccaccgacgacgacgacggcagtcgagcgcggcttcgccgcggcagcttcgctgcctcgactgccgtcgtcgtcgtcggtggcgatactctaagagtataagcaagtactcagcatgtatagaataattgatgacgtcacaactatgacgtcacgggatgacctttgacctctgacctttgaccttctatttgaccttgacctacttctgtgaccttctggtctactgacctttgaccttctatgaccttctgagctgatggtgggtataaataggcttgttgttgtcgagagcgcatcagtctacaagtgtctttcatagagtgaagaactaaataaaaataagtgtaaaaaaatagtagtgaaaaaaaaagttgtgtgagtgtaatacaaattctggtaagatgtcacttatgtatggaaaatataatatttgtaaaagaagattgtttgaaacgaaaacttacaatccgaaaactctattttacttgtcttataaaactgctagacttaacggtctagatttatcaacattacctttaactattagaaaactacaaaataaaatagataagcatatattatggtgtgatgaagatatagaaaatgtacttggtgccgaaagattaactaaatggaattttaatattattcaaccattaccagtaaatgtgtttttggctttacaaaatttaacagaaataccagattggttagatgaaactatgtgggtgcaatttaaatggatatataataaatctactacttttgaatttgatgattttcaagaaaagtttattgaacataaacattatgaaaagatatgtcataattgttttaatagatttcttgatcatgcattacaagaaatgagtactatcgaaaaaacaattattaattatataaagccatttgacgcaggagatatattaaatatattacaagattcatatcactggtgtgaatattgccatattactccattatttcgattaattaaaatagaatattaattacagatgaataatggagactccaacagagaaaccgatagtactaccagatctgatcaaagtaatttacgagagtcaccaacaagatcaccctctagtgaacaatgtagcatggtggcaactacatctagaaaacgtgaatgggcatatggaggacgaggaacaatggccagccttgcaaaagaatctcaagaaaactttcaatacatggcagaggaattggaaaaaatgggcaatcaattctttggatacgttactgggcaaagtgttaaaccttccagcgcatatatcagcgatgtcattatcttacgagatattcagctccgtgatcaatgtttggacgtcttgcgtgagtacggaagaagtagacgaaacggattgttcggattttctgaagaaggagaccacatccacgtcatccacgattgctcttacaccaatcggagttgcagggacatctggcttggtcaagtcaagcccttcggaactgttcagaaaactggcaaacccgtcaaatatatctgggagtttaaacgaaccgactggtatgatgtcttcatctatttctttatacgaaaacggggagagcgtgcaatatacattagaggagaaagtgggaaaataccgagtaacgatgaatgtgtacgatgggccagagagtttaaagaaagagaaatggtatcaagctccgattgcacggattactatgagtgtgaacaacaagagcacaaaattagccgtagatcagatgctggcagtactaacggaagactttatgaaaagaaaacctactcggcagggaaattcgcttacatacggcaaaagacaaaagcgttattaagaaaatattatgtgtctcctatcagtgctatatgtgatgtgcctgaatttcgtgatgatgatttattgtgtgatcctaaaaatcgtgattatatacaagcagcatgtgaagattttggtaaagatttaaatgctatgtcattacgtgaaatttacaatttacttactgaagattataattttactgatgataaagaacttaatccatatgctcaatttatttcatctatgaaatatgataatttggaaggctcattaaatatagttaatgaactattaaaatatcaatgtaatgatgatgaagatttaattgtagaattcttaactaaccttgttaatgtactagatagacgtatacctaagttaaatgcttttctaattatatctcctccaagtggtggtaaaaatttcttttttgatatgatttttggattgttattatcatatggtcaattgggacaagctaatagacataacttatttgcttttcaagaagctccaaataaacgtgtactattatggaatgaacctaattatgaaagttccttaactgatactataaaaatgatgtttggaggagatccttatactgttagagttaaaaatcgtatggatgcacatgtaaagcgtactcctgttattatacttactaataatactgtaccttttatgtatgaacttgcttttagtgatagaataattcaatataaatggaatgctgcgccattcttaaaggattatgaattgaaaccacatccaatgacattttttcttttattaagtaaatataacattacattttaataaatgggtatgggtacaatgttgtttcattataaactacctagtgttgcagcgtttccgtataatccattaaatgcactagttaaactatttacattaatattatttcgatatactgtattaccaggattagtattagcactagtagcatagggaaagtgagttggttgtgattccattacagtacaactagcaataacatctacataacccatagaatctgtccaagaatttaacggacttgaattaactaataaagcaccagtagttaacgctggaacagcttgcataccaatgtgaatactaggttgaatttgaggatgttcaaatccccatggtcctttatttaatctttgagatttttcaatatcagcatatatgtcaaaaaatgttgcaggaaaattatgaattctattattactagtttcagaaacttgttgagtagcaatttctggaccagaaacattggcagatctcattgctgttaaattttctccgatagatatagcacctttattagttggaaatccaattatattataatttaatggtggtttaatcatccccatttgaggtttatatgatacatcaagtaaacattgattattaacagttttagaatcatattgttgaaaatgttcagctaaacatggccaaccacctgtacctctttctgtttgtatatacatacagtaataattttgtagaaaagtaaatgaaccaacttgatggtgaggataattaccagcattaccaaaagcaatatcattattagagtctgctccataataatcagctatcatacctctataaccatttgcaccagatactgatgcatactttggaggagcactagcagtaggaatcataggttgatctgattggaacgcagtaaaagatctatcgattccccaacctaatttatttaatccaacagcagtttgtaaattagatatttgatttaaagtagcctgcttagtagctgtagaactagtttcaaaagctatacgattagatcgaaatataactttaacattacattcaacaattctagaaccaggaggtaataagtcaaattcagattgattcatatataatggtatcttttgccatggtatctcagctaaacatgtagttaataaacgatgtaaattaccagttgtacctgtttctgcaattacattgttagcaagaccaaaaatcataaatttatgagatttagtatatgtacttaacttcttaccaaagtttgtaaaaggacgtggaatttcataaatttcttgtccagttgtattaccaccaccagacgaagtacccgaaccagtaccaggtaatgacatagccattgtaacgtctaaatcagtagtagcacctgatgaactaggattctgagggtctgcagattgtgaacttgaatctgtattatgagcaccttttttagaaggagtttcttcagcaggagtatcagctttacgtttcgtactttctgacatcggagaatctgaaagagtttgttcctctgtatagaaatcttcaggaagttgaataccagcaaaattattaggtttattttctttaatccaatctgaccacgaatttaaatatttaggattaatttcacgagacatacctgaaacagaaggatatattactccagtgtgtttttcgatagcttgcttagttccaattccagtagctccaataatagctccaacagtgttactaggactttctttaagattgatagcattaacgacgtgatctaatgctttattaacaaatgtattatctgctttacttacttcttgagcagtttttgattgactataggcctcgtcgtgctccttagcgtctgcgtctatttcattagttggtggtcccctatttaaagaattaccaggaccaagatatttataaccaggaacagttaatcctcttttttctgcttctaatactttctgacttttagcataagcgtatccttttccttgtggatatgcttcacttaatccagctaatcttctattatgattataatatcttaataaatcagttttttcttgttcagtttctaattttaaattatcaggaaatgcacgattaaaatctccttgaaatatttgttttccaagttgtttagttttttcagaaatagcgtttctttgttttagaggattaccttttaaatcagtataatttccagttaaaacacttttaaaagcattcctatttcgatataatacgtcagcgtgtgttcctacagcaccaacagcaccaacaccaagttctggtaaaccaacagcagcagtttcttcagcagcagttataataccttcacttaataatggagtttcttctccaatagcaccgagttcaatatcttcagtaacagtattttctggtataattcgataaccaggtcgcgcgcgatgtgttaacgctctcgcgtagaaagacataatgactaaaaatagaacacgtatgcttatttatacccaacggtccgctgcctagctacatcctgttttgcacacggctccagcttcgacgggagtttgcggtcaagcgaggtcacaataacaagataataaaattacgcataaattatttcaaggtttgttttcatgctatctctttcactcatgttgctgtctctttctaacagttgctatgttgctgtcacacttacacactattgctatcctttactaacatcaggtactggtgttccaccatcagctccaaggtcttcggatcctctccatcatcaggtcagtagaccatcagctcagaaggtcatagaaggtcaaaggtcagtagaccagaaggtcacagaagtaggtcaaggtcaaatagaaggtcaaaggtcagaggtcaaaggtcatcccgtgacgtcatagttgtgacgtcatcaattattctatacatgctgagtacttgcttatactcttagagtatcgccaccgacgacgacgacggcagtcgagcg

SEQ ID NO: 158 - DNA, 4981 bp, Dysaphis plantaginea densovirus
  source 1..4981: mol_type = genomic DNA; note = Dysaphis plantaginea densovirus - NC_034532
ttgaacaagtaaccagtcgtaaggtgccacgcgccacattccacatctacccacctgtataaataaacacgttacgcttatctagtttattactcgtgcgtgctttggcgtgaatagttgtttaaacacctttacggagcctctcataattttattataaaagtgcattgacgatggtggatgcagtagtttgcgacaaagtgttcaattgttcagatataccggaccaaattcacgatggaagcaattcaaaaaacaccggagcacaagacggcggacgaagatatcgttttgacaccaccaccgacaccgaaaaaaaaacaatcaatgttgcggaaaaaacacaactcagtgctggggttttcgttggacgaaccacggcagaagaaacaaaaaccacaagaattggtgaaaatatcgaccggcccgacttcttctcagacggtcactttggtgagttcggacgaggaagaaaacgaattaaacgagatttatcagacgcccgtcgtgaaactaggcgcgcgaatgctaaaatcctcgaaacaagatatccgaaatttcgaggtcttcatgagtttttccgaagcgctgttccaacacaacaacccggactatgtgggatgcctgccgttgatagcgttagtaattcacatgtgccatttaccccagtggaaattgacaaagagtgtggaaaatttcgtagcgtcaatgttgaatcccaagcgttggagaccgatagtgcaactaaaccattggcagctgcaagcagcatcgataatgtgttcggaaaatctggagacgggagagaacgtgtggttggaatggatgaaattgcaaccgctgatctatccgacaatgacgccggatatcgaaaactggcgcgtgaaacatttgttagatatctgggaagcactgcccgatacgtctcggacatttgtgtcccgcaggaccgcgaggaatttattcaattcattgtcgatgttcgacaactatccggactatcttctcaagagcaaatgcgacttgtgtcctgccacgatacccacatccacgtcgtacacacctgcgcttactcaaacagtacttgtcgctgtgcctggctcagtggaagtgcaatctggagaagcaggagggttgcccgacatcgaagacgagttttcgcagctgacatctcagctgttgagtgggaagcaatctatcgatatttcactacaaatggccatgcaatccaagatattgaaagcggaggtccaaatgcaagactatgtctacgacttaaaagtttacaggtaaaaaattaaaatttactagttgtaacaaattattaaattttaattttacaggaaggaggatataaaatccctggacaagagtcagtggtatacaaaagtgtatacgaaagctgtaggaacattggccgggaaccacccgacaaagaccaagctggactcgatagtgagagatctgctggtggacatcaaggcgaagaaaaacatgaggatggaccgggcgtacgtgtatggccaaaaacattagatgaattgttggttaaatatccgtgttgtccacccgaagccttttataatgttaaagaattttataataatccccatttaaatcatatagacgataattgtaaaaaaatacgtgtagccttgagaaattggtgcgctagaatacgagaatggtcggtatccgagtttaacgattattattcgagtggtaaaataacgccgtactttaacgcttattctcgcgataaaaaacaggtttactacgacgtacacacatctgttcaaatagccgaggaactgttgtgttaccagtttgacaacgacggtgacctcatttctaagtttttatacgatgtttacgcaattgttgacaaactggttccgaaacgcaatagtatgtgcgtagtttctccaccaagtgccggtaaaaattttttcttcgacgcagtagcgagttattttttaaattacggaatgttcggtaccgccaataagactaataatttttcgtgggccgatggcgccggaaaacgactagtcttgtggaacgaaccaaactacgaaacatttcacgtagaaaaaattaaagaattgctcggcggtgacactactcgtgtgcatgttaagtacaaaggcgaccaacctctacaaggcccacctatttttcttttaactaacaacactttgagtatttgtaatgatccagcgttcgctgaccgattggtcacgtacgaatggaaatcagcaccctttttaaaacaatataataaaaaactaaacccattatttttttatgtattactaacaaagtggataaaggttgtaaatccaaataacaagtcataatgtattttaaataataagattttattgaataaacaaagaatatatatataattttatgtgtatattattgaataatgatatctgtaaagttgtcgtccactctcctggccactcgatagttctgtaattgctatgtggtggatttcttcacccggcacacgtactcgccgttgatgctcgaatactggttttggaaataggtgttcttatcggacgatatggaagcaccgtatgctgcgttttcaatattcaccagataaggtttatcgtaatgagtcaaattcattgtaccgtatccaaattcaacgaccatttcacagtttatgtcccattgtacttctatatcagtatagttttctggcacggtcttcaactcgtttgtagtcatgcggggtacggggaatactcccaaatgcagtgaaggttgtacgtgacatagactagtgtcacgtggtccgtgcatgatatattgtgatttttcaatgggagtcatataatgagtgccattacgttgcgcgagacaatcccactcgcctgattcgtaatctataatgttgttgtcagactgcttcatggcaccactcgccaaatccgtttgaacaatggacgataataaatttccatttttattgatggccgtgacgctattgtttgtaaaatcgtttgactcatcgccataatatccatttacgcgcatttggaatggttgcgataagtatccacatttaggagagtaggaatacgtggcgaccgtcttaccggttaagaaactagcgtcacctttccgtatatgttgagacaggtttggccacccaatgtccttgttgatcggatcgttggtggcgacggtacaaaaataccggtttaacatcatgggtaacattagcgacgaacacggcaacgccttgaacccctcttggaacgtaggtgttttcgtgagagacccgtacgctgctaatataaacttctcgtgatgcgattttacatactcctccgtgccttgattcaccattgccgccgtactgctgccaaatttcatggcacggtctattccacgcgttttcaagtttaaaccttcgccaatagctatgaatttattttgattcaacgtggccagagtcgtactcgacgaatttgtctcgaaagccgtacgtgggttacgcattacggccgtcactttaacgtgtttgcacattgctcccctgggtaaccaatcgaattcagccggtgacatgtagaaatacggttgttctaccggcaaactcatcagagaggttgttgtaagataagatttactagttccatcaagtttactaatcttccatgccagtccgtaggatagtaagctgtgattttttctaaacaccaatttatatccactagttgattggagcggccgaggtatgatactgttttcagggctaggattcccagtatctggatcagaaccacccgactcgcccgtgccagggagttccataccattcttcttctgtttctttgagtccccacttgaactagacggctcctccgatcccctctttgtactggaaacattagttgccatgtgtaaatcgctatccggtatatgaggccacagctctttatcagtaattccaccagcagcactagtccccgcaacaacgtcgtcagcactgataatatgatcaaaatcagaatcggcgttatccccgaatacactgtcttcgctccaatccaccgaaggagtcctaagactatctgtatcgtcagccgggtcagaattttgactggcttgcacgctggacccagacgagtgttcggaactctgttcggacgccgaggaatctattcgatcacctcctccacctagaacaaaaattggtaggttacgacgagttcgaccgatattatactgtcgtatagcgtaagcgcgttgggaactattaagtttagaccaattaggcctttgtggtggagggggaccttgataacgatgaggcatgatactcacgtaattctttcttccgaatttgcggtcgtggtttgaaccaaggtatttcgtacgacgattttttcgattgtggatatatagcgaacggatcaccggtgatagcttcgtccgtacgctccgcaatgttctttgcgactaaacccactatggtagcagcggcaccgtagtacggatcattcacatcccaggctgccttgattgcttttttatccatttcccatactttatctttggtggggttggcagcattgaaataatcaacatcgtgttccatcgttacccaatccaaatcggttttgggtaactctgtaaaattagatttattgttctcatctaccaaacggttgccgggtccggtaaattgcgatcccggccacgtaagtcctccagtattcttggcaccggcatattccttatcgattttctgctgtgcttgttgcctattggtcaaagaagccgttggaaattgttgaatttgttgtggcgcgcgatttaaactccacgacagtcccaacatctcgacttttaaacgcagactgactagggtcctatgtaatacacgtactttatgaactaaattaagcgggaaatgtggcgcgtggcaccttacgactggttacttgttcaa

SEQ ID NO: 159 - DNA, 6039 bp, Galleria mellonella densovirus
  source 1..6039: mol_type = genomic DNA; note = Galleria mellonella densovirus - NC_004286
acttgcttatactctaagagtatcgccaccgacgacgacgacggcagtcgctgcccggcgaagccgagccgccgcgaagcggcgagcgactgccgtcgtcgtcgtcggtggcgatactcttagagtataagcaagtactcagcatgtatagagtacttgatgacgtcatcagtgaccttgacctctgaccttctacttgaccttgacctacttctatgaccttctgtctactgacctttgaccttctgagctgatggtctactgacctgatgatgaagaggatccgaagaccttggagctgaaggtggaacatcaggacctgatgttagtaaaggacagtaacagtgtgcgagtgagatagcaatacaacaattattagaaagagatagcaatatgagtgaacgagataacatgaaaacaaaccttgagataatttatgcgcattttattatcttgttattgtgacctcatttgaccggcaaactcgcgtcgaagctaaaccgtgtgcaaaataggatgtgactggccagcggaccgtagagtatataagcagataaaagaagtgcgccatcatcagtctacgagcagtaataataaagtgaatatctcagtgaacaatagtgatattgcgagtggttccagaaactctaataggtatgtctatagcaaaatttctttatgttcgccgtttatttgaaaaagtatacaatcctaagtctctattttatgaagcttataaatgtgctagacttaatggtctagacatgtcaattttgcctaaacctatacttaatatgtcccacgatatggatactcagataattgcatgtggtgaagatattaatcatacattagcaatagaagagttagaacattgggattggtctaaacaaaacagattaccattccaattatatttggctgttatgaacttaacagaaatacctgaatggttagatgaaactatgttaattgaatgtgtatattattttaaagaactaataaatcatagagatccttacgatactgatgaactcaatacctggaatgctaatggaaaaccttttaaaactatgtggaaaatttgtaaattttgttacaacaattgtgaagatcctgacgactatagattcatatacaatagaacagtgtttgttgaagacgttgaagaaattataactagattacaagatagtgatagttggtgtcagttatgtcacacatgtccattatttaatatatcagcaatatatgataattctcctaataataaacaaagaagatattcaagctccgatgatgatgattatatgtctaacagtttttttgtaaaacatcctaatagtagacattaattacagatgaacaatggagacaccaacagagaaaccaataatactaccagatctaatcaagataatatacgagagtcatcaggagaatcctctagtgaacaatgtagcatggtggcaacttcatctagaaaacgtgagtgggcatttggaggacgaggaacaatggccagccttgcaaaagaatctcaagaaaactttcaatatatggcagaagaattggaaaaaatgggcagtgaattctttagatacgttactgggcaagatattaaaccttccagcgcatatatcagcgatgtcattatcttacgagatattcagctacgtaatcaatgtctggacatcttgcgtgagtacggaagaagtagacgaaacggattgttcggattttctgaagaaggagatcacatccacgtcatccacgattgctcttacaccaatcgcagttgcagggacatctggattagtcaagtcaagcccttcggatctgttcaaaaaactggcaaaccagtcaaatatatctgggaattcaaacgaacagactggtacgatgtcttcatctatttctttgtacgaaaacggggagagcgtgcaatattcgttagaggagaaagtgggaaaataccgagtaacgatgaatgtgtacgatgggccagagagtttaaagaaagagaagtggtatcaagctccgattgcacgaattactatgagtgtgaacagcaagagcacaaaattagccgtagatcaaatgttagcagtactaacggaagactttatgaaaagaaaacctattcggcagggaaattcgcatacatacggcaaaaaacaaaggcgttattaagaaagtattatgtgtctcctatcagtgcaatttgtgatgtaccagagtttcgtgatgatgatttgttatgtgatcctaaaaatcgcgattacatacaagctgcatgcgatgactttggtaaagatctcaatgctatgtctttacgtgaaatttatgatttactaactgaagattataattttactgatgaaaaagaacttaatccatatgctcaatttatttcttcaatgaaatatgataatctagaaggatcattaaatattatagatgagttgcttaaatatcaatgtaatgatgatgaaggtttaatagtagaatttctcactaatttggtcaatgtattagaccgtcgtatacctaagttaaatgctttccttgtaatgtctcctccgagtgctggtaaaaatttcttttttgatatgatttttggattattattatcttatggacaacttggacaagctaatagacataacttatttgcttttcaagaagctccgaataaacgtgtacttctatggaatgaaccaaactatgaaagttctttaactgatacaattaaaatgatgtttggaggagacccatatactgttagagttaagaatcgtatggatgcacatgtaaaacgcactccagttattatacttactaataacactgtaccttttatgtatgaaacagcttttgctgatagaattattcaatataaatggaatgctgcgccattcctaaaggaatacgaattgaaaccacatccaatgacattttttcttttattgagtaaatataatattacattttaataaatgggtttgggatacattattgttttattatacattacccaaagttgcaccattaccatacaaaccattaaaggcactagtaagagaattaggtgtaagattaatacggtaaattgtattaccaggattagtattagcttcagtagaaaatggaaagtgtgtaggttgagcttccattacagtacaactggacattacatctatatatcccatagaatctgtccaagaatttaacggactagaattaataagcagtgctccagtagttaatgctggtacagcttgaataccaatatgaacactcggttgaatttgtggattttcatgtccccaaggtcctttatgtaatacttgagatttttcaatatcagaataaatgttaaacaaatcagcaggaaaattacgagttaaattatgtgtactttcagctacattttgtgttgcttctggaggattagttacaactgctcctctcatattcaccaagttatcacctacagatatcgtgcctttaacagttggttgtccaataattttataatttaaaggagatttaattaaacccattttaggtttataagtaacatcaatcaagcattgattattaacagttttagaatcaaattgttgaagatgttcagccaaacatggccaaccaccagttccttgattagtttgttgatacatacaataataattttgaagaaatgtaaatgaacttacttgatgatgtggataatttccagcatttccaaatgcagtatcattagtagaatctgcaccataataatcagcaatcatacctctatatcctgtatcaccagtaactggttcatacttaggtgcagtagttgcagttggaatcataggttgatcagattgaaaagcagtaaacgctctgttaattccccaacctaatttatttaaaccaatagcggtttgcacattagatatttgatttagtgtagcttgtttagtaacagtagaactagtttcaaatgcaatgcgattagtacgaaaaataactttaacattacactcaacaactcttgaaccaggaggtaataaatcaaattctgattgattcatatacaatggtaatttttgccatggtatttcagctaaacaagtagtaagtaatcgatttacagcagtagtaccagttccggtaggacctattacattatttgctaaaccgaatatcataaatttatgagatttagtataagtacttaattttttaccaaagttagaaaatggtctaggaattatatacacgtcttgaccttgcgtgtttcctcctccagatgatgttccagagccagttcctggtaatgacatagccattgtaacgtcaagatcagttgtagcaccagatgaactaggattttgaggatcggtactttgtgaattaacgttaacgccagtagtgcctttttttgcaggagtttcaacagcaggagaatcagccttgcgtttcgttgcttcttgcatcggtgaatctgaaagagtttcttcttgaaaaaaatcgtcaggtaaattggaatatccgacccaatttttagaatttccttcagcaatataatctttccaattaggttgattaatgtatctaggattaatatgacgggacatacctgaaacagaagggtagattactccactatatttttcaatagcttgcttagttccaattccaatagctccaatagcagcaccaaaagcgttaccaggtgtttctttaaaattaatagcattaaccacgtgatctaacgctttattaacaaatgtattatctgctcgacttacttcttgacttgttttcactttatcataagcttcgtcgtgttctttagcgtcttcgtctatttgatttataggttgacctctattcaatgaatttccaggaccaagatatttatatccaggaacagttaatccacgtcgttcagcttctaatactttttgacttttagcataagcatatcctttcccttgtggataagcttcacttagtccagctaatcttctattatgattataatatcttaataaatcagctttttctttttcagtttccaattttaaattatcaggaaatgcacgattaaaatctccttgaaatattttctttcctagttgtttaattttttcaggaatagcgtttctaggttttaaaggatttccttttaaatcagtataattaccagttaaaacagatttaaaagcgtatctatctctccaccattcatgtgcatgtgttccaatagcaccagccacaccaatagcaacttctggtaatccaatagcaccttcttctacagctgtaataacaccttcacttaacaatggagtttcttcaccaatagtacctaattcaatatcttcagtaacagtactttccggtattatacgataaccaggtcgtgcgcgatgtatcaactgatttttgaagaaagacatagtgactaaaaatagaacacatagccacttatatactctacggtccgctggccagtcacatcctattttgcacacggtttagcttcgacgcgagtttgccggtcaaatgaggtcacaataacaagataataaaatgcgcataaattatctcaaggtttgttttcatgttatctcgttcactcatattgctatctctttctaataattgttgtattgctatctcactcgcacactgttactgtcctttactaacatcaggtcctgatgttccaccttcagctccaaggtcttcggatcctcttcatcatcaggtcagtagaccatcagctcagaaggtcaaaggtcagtagacagaaggtcatagaagtaggtcaaggtcaagtagaaggtcagaggtcaaggtcactgatgacgtcatcaagtactctatacatgctgagtacttgcttatactctaagagtatcgccaccgacgacgacgacggcagtcgctgcccggcgaagccgagccgccgcgaagcggcgagcgactgccgtcgtcgtcgtcggtggcgatactcttagagtataagcaagt

SEQ ID NO: 160 - DNA, 4926 bp, Helicoverpa armigera densovirus
  source 1..4926: mol_type = genomic DNA; note = Helicoverpa armigera densovirus - NC_015718
gtgtcgggcgttttttgcgtatatttaggaaggagcttttttattttccacaatttgaccttgaactgtcattgacttgtgtgttatatcacgtgacatcatgtgactgcgtacgtgactagataaggatattttgaagttgttaagataaagtgtcccaaaaaaacaagattagcctaaaacaacaacagataacattgacatattgacatatcttgacatttgattgacatatcagtgacagtgattgatgtattgttattaaaataagatatggacgaaggttaatagataggttatcagagttggggatataaagtgggatattttttggtatataaagtagtaataacactgcacgtttagaagatggttgtattctctactatcgcgtattgtgaagttttgagtttcctcgtcaagaatttcgaagaaaaggttctaaaatggaatcacgtgatcaaatcagtgaaatcgttgaagactgccctcatatcagtgacatcgatgaaaacgattcctgcgacgttggacaaactggtgagcactctacaagacctggagtcggaggaggacttggaggagttttgtgtgcagtcaaaagatctcttgcaagacctttcagaacattgcaaggagttgacattgcagaacaacaaaaacagaatgtttctattgagagttttgacactcctctttcatcatccgacgacgaaagtaaaacacctgcagacaatagtgacagaagaagccctcgaagagatgaagatgaaaatgaagaactcggacttttgctgggagacgtggtcatatatgcaagtatacaaagagagtggacccttagtgtcagtgaaagattgtttagatattttacagaaggggaccacggagctcgacgacttctacatgactctgtctatttcaagaatcaaagagaatttgtcgaattccataagagaattctatcagtcttacaaaacactgatggatggatcgttgcagtccatgacgaatcatctacagcatcttataagcttaagttctcaggatggcagtctgaaggaaagccatggggactattaccaaagccagccctcagaaaagaagacacacacgatgaagcaggacgacgacacatcatcgaaagagacagaatcatctgggacgtcggaaccctcgaagaagaaacagaagttatcccaatcccgaaatacggacatttccacatacttcacccttgcagatggtacaactccaattgcaggcacctcgggaaacatctcgacgtggctaaacgatatcggcaaatcagaactatgggcgccctcagtgaatcccacgtcaggaatacactcatctatctgcagacgaacggcaaatggctcctcgactacaaaagtcccagtggacaagaattcggatttgtatatagagctcaatgtctacaatctaagagagtatgcagtggagaagaagagcgaaaggtggaagacagcactggtgagaatgaagtttacggagagggagaactcgccgatagccaagggaatcatgcaacttgtaaaagacgtaaacgtgagactgcaggaacatccggagagagaaacatatcaacggaaaacttattagaacacatcaccagcatagtgtgctaccccatggatcatgtgttccaaacgagagattggtataccggtaaatataagtacttgatatcttccgataaacttgtaaagcgatgctatagtatcctccaaaaacaattaatgaattggtcttataacgattttttaaatcactatagaaaagatgatacaaaattaatatttggtgcaccttctttggatacctttaatgattattacatgtctctggaggattctatagatgctatagaagaactgttggattttcaattgtcaaacatatctgaattctcagacttgaatgttactgataagaaaagagaatttgtgacggatttatgggatgtattagaaaaaaaggttccaaagaaaaatacattccaaataattagccctccttctgccggtaaaaactttttattagatgctatatttgcattctattggaacgttggtatgattaggaactttaacaagtatgaatcttttcctttaatggaagcggtagacaagagagttaattgttggaatgaaccaaactttgaaccttcagctgaagataccatcaagatgatcttaggtggagatccgatcaaagctgcatacaaatatgaaagcgaacgcaacattgctagaacacctgtaattgtaatgtctaataaaaatgtatttaaaattaacgatgcgttcgaagaccgaataattacatattattgggacagagccgagtttctgcgtaaataccgtaaaaaggtcaatccattgatatggccttatcttgttgacaactatgttaaatatgaactttgataacctttatcttatctgtagtgtgtagtatataaatggaatgaataaagatttataaacagtaatgccttttcattggcctagacacaactatctaggacctggtacaaaagactttacaaaagaacctgtagacgaagacgacgagattgcgcgtcgtcacgacttggcatacgctaacgctacatctcatcaagatatttacaaagcagataaagaagcaagtaaagagtttttcgactcgtttaaaaagacttggcaccctgaagcatttgtgggaagtgcagctctcaaggttaaaaattttacagaagaaaaaattgtaggtagacctttatatggtatgcctaccaaagactggggaagaattaagaaaataaacgaagctagggctagacggagacaagcggaagagtctgtagatgacctcagaagagaatacgggcctcccaacatttacgacgcagacactgatccagaagctgctatgggtagtcagtctacagatgttccggacaatgctggtgaggcgatggacatggtggcagatcaacctagggctggtggcgctccatctggtgggtcctctagtggtggaacaggttctaacatgggcgatgtctacgctggatcttgtcaaaatccaaacaaacatatcaaaacttttaaaaagtcttaccactttacaatttccaacaaactgcccgagtggaaaagaaacgttgaaaacggacacgtggaataccttgcgagatataattcaattcatgggattccatgggaactagttggcatgtatttgagtgaaggagagattggacaattatttgaaaactattcattagtacgagtagaagaagtcaactgtaaagtatacagtttgggagttagattgccatttgtaacagggcagtctgtaacaaccgtggctaacgcgaacgctcagtaccccatagcaaagtttaactttgacaatgatttcttcactagctacgaacctgaaaatgtgtacaacgttttggaaaaatgttggggttcagaatggaaaaatatggatactaccaatacaaactggagtacacaatttccaaacttgacagcaagcactacatcaagagacatgaacaatcctatactagttcattatcctagatacagttggataacaagtggaactagagaacagtttccaaaagatgttggaatatatgactattgcagcattaaaaatggatctacagtctttggattggcctgggaaatgacacatagacctaaacaagggatattaaatgcatttactacgcctgttatcacaggacagcagtttgttctaaacactaatgatgctgcagaagaaacaccgatatcgggagagagagcaaactttatagtaggcacggaatggtacgctgatagaagaaacgctagtttagcggtaagagattggtgtctaggaagacatgtaggcaattctagctcaagagacttgcaagtggacaacactggaatatatgcacaaggagacgaaaaggttcagagtatggctatgccaaagtttatgattggtttcgtcaatattagaaatcaagatgatactattcttgaagctaaatgggatatcatggtagaatgctcaatcaaaatactttgcatagataacggacaaagaggattcgttacacgagacactagacctgtaccttacctcatgaatcctttcctcggatataaaaacaacgaaattggaactaatgctctacaccccaacataaatatgaagaatgtgacatacaacaagagaagtatgaccagacgtttgaatgtaacgatgcttgccgccatggtacaagatcccaaatttaaagactttttcaatgctacaacggaaggaaaaaacctactgaaaactatccatgatgacgccgaagcagcagaaaaagcttataaaatatgggcttccaaatttgctaaacataaacatgtgtatcatagagacatgcaaaatttgtattctaatattgtaaaagcattaaaaaactagatacaccgggtacatctcaaaagaaaattaaagccagtactatccttcttaaacaaaatataaaatataaactctataattgggatatacccggtaacaaaacttggttacacactttaatagacaactataaaaataatcataaagatgtaatcgtaattgatgatataataaaacattaatcgtccatataatttttcatttatttaacaccctcaaacataatcatgtgatagtcacgtgatataacacacaagtcaatgacagttcaaggtcaacttgtggaaaataaaaaagctccttccaaaatatacgcaaaaaacgcccgacacaaaagctttgacacacacttgtgttccacgctctcaacttcccccactaaagtgggggaagttgagagcgtggaacacaagtgtgtgtcaaagc

SEQ ID NO: 161 - DNA, 5908 bp, Junonia coenia densovirus
  source 1..5908: mol_type = genomic DNA; note = Junonia coenia densovirus - NC_004284
gtattgccaccgacgacgacgacggcagtccctgccggcgaagccggccgccgcgaagcggcaagggactgccgtcgtcgtcgtcggtggcaatactcgtagagtataagcaagtactcagcatgtatagagtacttgatgacgtcacggtgaccttgacctttgaccttctatatgaccttgacctacttctgtgaccttctggtctactgacctttgaccttctgagctgatgtctactgacctgatgatggagaggatccgaagaccttggagctgaaggtggaacacaggacctgatgttagtgaaggacagcaatagtgtgcgagtgagatagcactatagcaactgttagagcgagatagcaatatgagtaaaagagatagcatgcaaacaaaccttgagataatttatgcgcattttattatcttgttattgtgacctcgtttgaccggcaaactcgcgtcgaggctgggccgtgtgcaaaacaggatgtggctggccagcggaccattgactatataaaggctgacgtgttctatttttagtcagtatgtctttctacacggccgggttaatacatcgtgcgcgacccggttatcgtattataccagaaagtactgctactgaagatattgaacttggtgctattggagaagaaactccattattaagtgaaggtgctgttactgctgtagaagaaagtgctgctgttggtttaccagaacttggtgctggacttgctggtgctattggaacacatgctgacgtattgtatagaaatagaaacgtttttaaaagtgttttaactggaaattataccgatttaaaaggcaatcctttaaaacaacgaaacgctatttctgaaaaaactaaacaacttggaagaggaatatttcaaggcgatttcaaccgtgcatttcctgatgatttaaaattggaaactgaacaagaaaaaaaagatttactacgttattataatcacaatagaagattagctggattaagtgaagcttatccacaagggaaaggatacgcttatgctaaaagtcaaaaagtattagaagctgaacgacgaggattaactgttcccggatataaatatcttggtcctggaaattcacttaacagaggtcaacctactaatcaaatagacgaagacgctaaggaacacgacgaagcatacgataaagcgaaaacaagtcaagaagtaagtcaagcagataatacatttgtcaataaagcgttagatcacatagttaatgctatcaatcttaaagaaactcctggtaacgcttttggagctgctatcggagctattggaattggaactaagcaagctatcgaaaaacacagtggagtaatctacccttctgtttcaggtatgtcccgtcaaattaattctaaatacttaaatagctggcatgactggattgagcaaaataaacataataattttgaaggaatacaattaccagaggacttttacacagaagaacaaactctttcagattcaccgatgtcagagggaacaaaacgtaaagctgatactcctgttgaagaaggtccttctaaaaaaggtgctcataacgctccacataactcgcaaggtacagatcctcaaaatcctagttcttccggagcaactacttctmttgacgttgaaatggctatgtcattacctggaactggttctggaacatcatctggaggaggcaacacttcaggtcaagaggtttatgtaattcctcgtccattttcgaactttggtaaaaaattaagtacttatacaaagtctcataaatttatgatatttggtcttgccaataatgttattggacctacaggtactggtacaacagctgtaaatcgtttaattacaacttgtttggctgaaattccatggcagaaattgcctttgtatatgaaccaatctgaatttgatttattacctcctggtagtagagtagttgaatgtaatgttaaagtaatattcagaactaatcgtattgcatttgagactagttcaactgctactaaacaagctacattgaatcaaatatctaatttacaaactgctgttggattaaataaacttggatggggtattgatagatcatttactgcttttcaatcagatcaacctatgattcccactgctactagtgcaccaaaatatgaacctataactggtacgactggttatagaggtatgatagctgattattatggtgctgattctactaatgatgctgcatttggtaatgctggtaactatcctcatcatcaagttggttcatttacttttattcaaaattattattgtatgtatcaacaaaccaatcaaggtactggaggttggccatgtttagctgaacatcttcaacaatttgattctaaaactgttaataatcaatgtttaattgatgtaacttataaacctaaaatgggtttaattaaaccaccgttaaattataaaattattggtcaacctactgcaaaaggtactatatctgttggtgataatttagttaacatgcgaggagctgttgtaataaatccacctgaagcaacacaatctgttactgaatcaactcataatttgactcgcaattttccagctaatttgtttaatatttattctgacattgaaaaatctcaaattttacataaaggaccttggggacacgaaaatccacagatacaaccaagtgttcatattggtattcaagctgtaccagcattaactacaggagctttacttgtaaattcaagtcctttaaattcatggactgattctatgggttatattgatgttatgtctagttgtactgttatggaatctcagcctacacactttccattttcgactgatgctaatactaaccctggtaataccatttatcgtattaatcttacaccgaactctcttactagtgctttcaatggattgtacggtaatggagctactcttggtaacgtttaaataaaacaataatgtatcccataaccatttattaaaatgtaatattatatttactcaataaaaggaaaaatgtcattggatgtggtttcaattcataatcctttaagaatggcgcagcattccacttgtattgaataattctatcactaaaagcagtttcatacataaaaggtacagtattattagtaagtattataactggagtgcgttttacatgtgcatccatacgatttttaactctaacagtataaggatctcctccaaacatcattttaattgtatcagttaaagaactctcatagttaggttcattccataataatacacgtttattaggtgcttcttgaaatgcaaacaagttatgtctattagcttgacctaactgaccataagatagtaataatccaaagatcatatcaaaaaagaaatttttaccagcacttggaggagatataataagaaaagcatttaacttaggtatacgacggtctaatacattgaccaaattagtaagaaactctacaattaaatcttcatcatcattacattgaaatttaagtaattctataataatattcaaagaattctcaagattatcatatttcatagaagaaataaacaaagcatatggattaagttcttgttcatcagtaaaattataatcttcagtaagtaaattataaatttctctcaaagacatagcatttaaatccttaccaaagtcatcgcatgctgcttgtatataatcacgatttttaggatcacataacaaatcatcatcacgaaattctggcacatcacatatagcactcactggagacacataatattttcttaataacgcttttgtctttttccgtatgtatgcgaatttccctgccgaataggctttcttttcataaagtcttccgttagaactgccagcatctgatctacggctaattttgtgctcttgctgttcacactcatagtaatccgtgcaatcggagcttgataccatttctctttctttaaactctctggtccatcgtacacattcatcgttactcggtattttcccactttctcctctaacgtatattgcacgctctccccgttttcgtacaaagaaatagatgaagacatcgtaccagtctgttcgcttgaattcccagatgaatttgactggtttgccagttttctgaacagatccgaagggcttgacttgactaatccagatgtccctgcaactgcgattggtgtaagagcaatcgtggatgacgtggatgtgatctccttcttcagaaaatccgaacagtccgtttcgtctacttcttccgtactcacgcaagacgtccaaacattgatcacggagctgaatatctcgtaagataatgacatcgctgatatatgcgctggaaggtttaatactttgcccagtaacgtatccaaagaattcactgcccattttttccagttcttctgccatatattgaaagttttcttgagattcttttgcaatgctggccattgttcctcgtcctccatgtgaccattcacgttttctagatgtatttgccaccatgctacattgttcactaggggatgttcttcctgaagactctcgtataatgtcttgattaggtctggtagtactatcggtttctctgttggtgtctccattgttcatctgtaattaatgtctactattaggatgttttacataaaaactattagacatatattcgtcctcttctgaactacttgagtatctcctttttttattaggagagttttcataaattacagatatattaaacaatggacaagtatgacatatttgacaccaactactaccatcttgtaatctatttataatatcttcagcatcttctacgaacacagttctattatacataaatctgtattcatctggatcttcacaattagtataacaaaatttacaaattttccacatagttttaaagggctttccattcatattccatgcattaaattcatcagtatcataagggtctctatggttaattaattctttaaaataatacacacattctatcagcatagtttcatctaaccattcaggtatttcatttaaatgcataacagctaaatataactggaaaggtaatctgttttgttttgtccaatcccagtgttctaattcttccatagctaaagtatgatctatgtcttctccacaagcaataatctgattatctagatcatgctgcatattaagtataggtttaggcaaaattgacaagtctagaccattaagtctagcagtcttataagcctcatagaacaaagactttggattgtacactttttcaaataaacgaacgaacacaaagaaacctggcaatagacataccgattatattctggaaccacttttgcacaacactactttttcactgagatgttcactcgacgactgctgctcgtagactgatgatggcgctctgctgttatctctatttatagccaatggtccgctggccagccacatcctgttttgcacacggcccagcctcgacgcgagtttgccggtcaaacgaggtcacaataacaagataataaaatgcgcataaattatctcaaggtttgtttgcatgctatctcttytactcatattgctatctcgctctaacagttgctatagtgctatctcactcgcacactattgctgtccttcactaacatcaggtcctgtgttccaccttcagctccaaggtcttcggatcctctccatcatcaggtcagtagaccatcagctcagaaggtcaaaggtcagtagaccagaaggtcacagaagtaggtcaaggtcatatagaaggtcaaaggtcaaggtcaccgtgacgtcatcaagtactctatacatgctgagtacttgcttatactctacgagtattgcc

SEQ ID NO: 162 - DNA, 6034 bp, Mythimna loreyi densovirus
  source 1..6034: mol_type = genomic DNA; note = Mythimna loreyi densovirus - NC_005341
cttatactctaagagtattgccaccgacgacgacgacggcagtcgctgcccggcgaagccgggccgccgcgaagcggcgagcgactgccgtcgtcgtcgtcggtggcaatactcttagagtataagcaagtactcagcatgtatagagtacttgatgacgtcatcggtgaccttgacctttgaccttctatttgaccttgacctacttctgtgaccttctggtctactgacctttgaccttctgagctgatggtctactgacctgatgatggagaggatccgaagaccttggagctgaaggtggaacaccaggacctgatgttagtgaaggatagcaatagtgtgcgagtgagatagcaatatagtaactgttagaaagagatagcaatatgagtgagcgagatagcatgaaaacaaaccttgagataatttatgcgcatttttattatcttgttattgtgacctcgtctgaccggcaaactcgcgtcgaagctgggccgtgtgcaaaacaggatgtggctggccagcgatccactgactataaatagagctgagcagagagcgccatcatcagtctacgggcagcagtcgtcgagtaaacatctcagtgaaaaaagtagtgacttgtgagtggttccagaaactctaataggtatgtctattgcaagatttctttgtgttcgtcgcttgtttgaaaaggtgtacaatcctaagtctctgttttatgaggcttataagtgtgctagacttaatggtctagacatgtcaattttacctaaacctatacttaacatgtctcatgatatggatactcagataattgcttgtggtgaagatattgaccatacactcgcaatggaagaattagtacactgggattggacaaagcaaaatagattacctttccaattgttcttagctgtcatgcatttaaatgaaatacctgaatggttagatgaaactatgcttatagaaagtgtatattattttaaagaattaattaactacagagatccttatgatagcgatgaatttaattcatggaatttaaatggaaaacctttcaaaactatgtggaaaatatgtaaattttgttataccaattgtgaagatccagatgaatatagatttatatataatagaactatatttgtggaagatgctgaagacattataaacaggtttcaagatggtagtagttggtgtcagatgtgtcatacctgtccattattcactgtatctgttttatatgataattctcctaataaaaaaaggagatactcaagtagttctgacgatgattatatgtcaaacagtttctatgtgaaacatcctaatagcagacattaattacagatgcaagatggagacaccaacagacaaacagatagtactaccagatctaatcaagacgatttacgagagtctacaggaggaacatcctctagtgaacaatgtagcgtggtggcagctccatctagaaaacgtgagtggtcacatggaggacgaggaacaatggccagcattgcaaaagaatctcaagaaaactttcaacatatggcagaagaattggaaaaaatgggcggtgaattctttggatacgttactgggcaaagtattaaaccttccagcgcatatatcagcgatgtcattatcttacgagatattcagctccgtgatcaatgtttggacgtcctgcgtgagtacggaagaagtagacgaaacggactgttcggattttctgaagaaggagatcacatccacgtcatccacgattgctcttacaccaatcgcagttgcagggacatctggattagtcaagtcaagcccttcggatctgttcaaaaaactggcaaaccagtcaaatacatctgggaattcaagcgaacagactggtacgatgtcttcatctatttctttgtacgaaaacggggagagcgtgcaatatacattagaggagaaagtgggaaaataccgagtaacgatgaatgtgtacgatgggccagagagtttaaagaaagagaagtggtatcaagctccgattgcacggattactatgagtgtgaacagcaagagcacaaaattagccgtagatcagatgctggcagtactaacggaagactttatgaaaagaaagcctattcggcagggaaattcgcatacatacggcaaaagacaaaggcgttattaagaaaatattatgtgtctccaataagtgctatttgtgatgtgccagagtttcgtgatgatgatttgttatgtgatcctaaaaatcgtgattatatacaagcagcatgtgatgactttggtaaggatcttaatgctatgtctttacgtgaaatttatgatttattaactgaagattgtaattttactgatgaaaaagagcttaacccttatgctcaatttatttcttcaatgaaatatgataatttagaagggtctttaaatattattgatgaattacttaaatatcaatgtaatgatgatgaaggattaattgtagaatttcttactaacttggtcaatgtattagaccgtcgtgtacctaagttaaatgcttttcttgtaatgtctcctccaagcgctggtaaaaattttttctttgatatgatttttggcttactattatcttatggacaacttggtcaagctaatagacataacttgtttgcttttcaagaagctcctaataaacgtgtattattatggaatgaacctaattatgagagttcactaactgatacaattaaaatgatgtttggaggagacccatatactgttagagttaagaatcgtatggatgcacatgtaaaacgcactccagttattatactaactaataatacagtaccttttatgtatgaaactgcttttgctgatagaattattcagtataaatggaatgctgcgccattcctaaaggattatgaattgaaaccacatccaatgacatttttccttttattgagtaaatataatattacattttaataaacaggtttgggatacattattgttttattaaacattacccagagttgcaccattaccatataaaccattaaatgcactggtaagagagttaggtgtaagattaatacgataaattgtattaccaggattggtattagcatcagtagagaatggaaagtgtgtaggttgagattccattacagtacaactagacattacatcaatatatcccatagaatctgtccaagaatttaaagcactagaattaacaagcaatgctccagtagtcaatgcaggtacagcttgtataccaatatggacacttggttgaatctgtggattttcatgtccccaaggtcctttatgtagtatttgagacttttcaatatcagaataaatgttaaacaaattagcaggaaaattacgagttaagttatgtgtagtttcagttatattttgtactgcttctggaggattagttacaactgctcctctcatgtttactaagttatcgcctacagatacagtacccttattagttggttgtccaataattttataatttaaaggaggtttaattaaacccattttaggtttgtaagttacatcaatcaaacattgattattaacggttttagaatcaaactgttgaatatgttcagctaaacatggccaaccaccagttccttgattagtttgttggtacatacaataataattttgaataaaagtaaatgaaccaacttgatgatgtggataatttccagcatttccaaatgcagcatcattagtagaatctgcaccataataatcagcaaccatacctctatatcctgtattaccagtaacaggttcatatttaggtgctgcagtagcagtaggaatcataggttgatcagattgaaaagcagtaaatgatctatcaattccccaaccaagtttatttaaaccaacagcagtttgcaaattcgatatttgatttaatgtagcttgtttagtagctgttgaactagtctcaaatgcaatacggtttgaacgaaatataactttaacattacactctacaactctagaaccagcaggtaataagtcaaactctgattgattcatatataaaggtaacttttgccatggtatttcagcaagacatgtagtaattaaacgattaacagcagtagtaccagttccagcaggaccaattacattattagccaaaccaaatatcataaatttatgggactttgtatatgtacttatttttttaccaaaattagaaaatggtctaggaattacatacacttcttgaccttgcgtatttcctcctccagacgaagttccagaaccggttccaggtaatgacatggccattgtaacgtcaagatcagttgttgcaccggctgaactagggttttgaggatcggtactttgtgaattaacgttagagttagtggcaccctttttagcaggagtctcagcagcagatgaaccagctttgcgtttcgttggctcttgcatcggtgaatctgaaagagtttcttcttgaaaaaagtcgtctggtaaattggaatatccttcccaatttttagaatttccttcggtaatataatctttccaattaggttgattagcgtatttaggattaatatgacgtgacatacctgaaacagaagggtagattactccactgtgtttttcaatagcttgcttagttccaattccaatagctccaatagcagcaccaaaagcgttaccaggcgtttctttaaaattgatagcattaaccacgtgatctaacgccttattaacaaatgtattatctgcttcacttacttcttgacttgtttttgctttatcgtaagcttcgtcgtgttctttagcgtcttcgtctatttgattagtaggttgacctctattaagtgagtttccaggaccaagatatttatatccaggaacagttaatccacgtctttcagcttctaatactttttgactcttagcataagcgtatccttttccttgtggataagcttcacttaaaccagctagtcttctattatgattatagtatcgtaataaatcgtttttttcttgctcagtttctgtttttaaatcttcaggaaatgcacgattaaaatcaccttgaaatataccttttcctaattgctttgtcttctcaggaatagaatttctttgttttattggatttccttttaaatcagtgtaatttccagttaaaacacttttaaatacgtttctatttctatataacacgtcagcatgtgttcctatagcaccagcaagtccaacggcaacttctggaactccaatagcaccttcttctacagcagtaatagcactttcacttaataaaggagtttcttcaccaatagtacctaattctatatcttcggtagcagtactttctggtattatacgatagccaggtcgcgcgcgatgtgttaacccgctcgtgtagaaagacatactgactaaaaatagaacggccaacaccttatatagtcagtggatcgctggccagccacatcctgttttgcacacggcccagcttcgacgcgagtttgccggtcagacgaggtcacaataacaagataataaaaatgcgcataaattatctcaaggtttgttttcatgctatctcgctcactcatattgctatctctttctaacagttactatattgctatctcactcgcacactattgctatccttcactaacatcaggtcctggtgttccaccttcagctccaaggtcttcggatcctctccatcatcaggtcagtagaccatcagctcagaaggtcaaaggtcagtagaccagaaggtcacagaagtaggtcaaggtcaaatagaaggtcaaaggtcaaggtcaccgatgacgtcatcaagtactctatacatgctgagtacttgcttatactctaagagtattgccaccgacgacgacgacggcagtcgctcgccgcttcgcggcggcccggcttcgccgggcagcgactgccgtcgtcgtcgtcggtggcaatactcttagagtataag

SEQ ID NO: 163 - DNA, 5990 bp, Pseudoplusia includens densovirus
  source 1..5990: mol_type = genomic DNA; note = Pseudoplusia includens densovirus - NC_019492
cttatactctacgagtattgccaccgacgacgacgacggcagtctgtcggctccgccgaccgccgcgaagcggcgagactgccgtcgtcgtcgtcggtggcaatactcgtagagtataagcaagtactcagcatgtatagagtacttgatgacgtcacggtgaccttgacctttgaccttctatatgaccttgacctacttctgtgaccttctggtctactgacctttgaccttctgagctgatggtctactgacctgatgatggagaggatccgaagaccttggagctgaaggtggaacaccaggacctgatgttagtgaaggacggcaatagtgtgcgagtgagatagcaacatagcaactgttagagcgagatagcaatatgtgtgaaagagatagcatgaaaacaaaccttgaattaatttatgcaaattttattatcttgttattgtgacctcgattgaccggcaaactcgcgtcgaagctggtagtgccgtgtgcaacttaaactgctggccagcggaccattgggtatataaagtgatattattagagcgccatcatcagtctacacgaagcagtcgtcgagtaaacatctaagtgaaatagtagtgttgtgcaaaagttgttcctgaatataatcggtatgtccaactcaagaattgctttaattcgtcgtttatttgcacctaaagtgtacaatccaaagtcaatgttctacctagcatataaaagtgctagacttaatggtgtgtctttttcaagattacctaaaaagatacgtaaaatgcaacatgacatggacactcagattatagcttgtggagaagatatagatcatactttagctatagaagagttagaaaaatgggattggacccaacaaaaacgactaccatttcagttgtttttagctgccatgcatttaaaagaaataccagattggttagatgaaacaatgttaattgaaagtgtatattattttaaagaattaattaattatagagacccttacgatactgatgaatttaatacttggaatatgaatggaaagccttttaaaactatatggaaaatatgtaaattctgttataccaattgtgaagatcctgatgaatatagattcatgtttaaccgcactgtatttgctgaagatgctgaggaaattgttcagagatttcaagatgaaagtagttggtgtgaaatatgtcatacatgtccattgtttaatatatctgtgatttatgagaattctccaaataataaaaggaaatgttcaagtagttccgatgatgaggacataatttctgatagcttctatgtaaaacatcctaaagcagaaaattaattacagatgaacaatggagacaccgacagaaaaaccgatagtactaccagacctaatcaagacattatacgagagtcttcaagaggaacatcccctagtgaacaatgtagcatggtggcaactacatctagaaaacgtgagtggtcatatggaggaagaggaacaatggccagcattgcaaaagaatctcaagaaaactttcaatatatggcagaagaactggaaaaaatgggcagtgaattctttggatacgttactgggcaaagtattaaaccttccagcgcatatatcagcgatgtcattatcttacgagatattcagctccgtgatcaatgtttggacgtcttgcgtgagtacggaagaagtagacgaaacggactgttcggattttctgaagaaggagatcacatccacgtcatccacgattgctcttacaccaatcggagttgcagggacatctggattagtcaagtcaagcccttcggatctgttcaaaaaactggcaaaccagtcaagttcatctgggaatttaagcgaacagactggtacgatgtcttcatctatttctttgtacgaaaacggggagagcgtgcaatattcgttagaggagaaagtgggaaaataccgagtaacgatgaatgtgtacgatggaccagagagtttaaagaaagagaaatggtatcaagctccgattgcacggattactatgagtgtgaacagcaagagcacaaaattagccgtagatcagatgctggcagttctaacggaagactttatgaaaagaaagcctattcggcagggaaattcgcatacatacggaaaaagacaaaagcgttattaaggaagtactatgtgtctccagtaagtgctatatgtgatgttccagagtttcgtgatgatgatttactatgtgatcctaaaaatcgtgattatatacaagctgcatgcgatgacttcggtaaggatttgaatgctatgtcattaagagaaatttataacttacttactgaagactacaattttactgatgaaaaggaacttaatccatatgcactattcatttcatctatgaaatatgataatcttgaaaattctttaaatattattgttgaattactaaaatatcaatgtaatgatgatgaagatttaattgtagaatttcttactaacttggttaatgttttagatcgtcgtattcccaaattaaatgcttttcttattttgtctcctccaagtgctggtaaaaatttcttttttgatatgatttttggattgttattatcttatggacagttaggtcaagctaatagacataacttgtttgcttttcaagaagcacctaataaacgtgtgttattgtggaatgaacctaattatgaaagttcgttaacagacacaattaaaatgatgtttggaggagacccttacactgttagagttaagaatcgtatggatgcacatgtaaaacgcactccagttattatactaactaacaatactgtaccttttatgtatgaaactgcttttagtgatagaattattcaatataaatgggatgctgcgccattcctgaaggattatgaattgaaaccacatccaatgacatttttccttttattgagtaaatacaatatatcattttacatttgtgttttatttaagcataattaggaccattgccatataaaccattgaaagcagaattattagtatttggagtaagaggaatacgatatacagtattaccaggattagtggtagcttctgttgcaaacggaaatgctgagggctgttgttccataactgtacaagtagcaactacatcgatatatcccatagaatctgtccaagaattcaaaggacttgaattaactagtaatgcaccagtagttagagcaggaacagcctgtataccaatatgaacacttggttgaatttgaggttgctctgcaccccatggacctttatgtaaaacttgagacttttcaatatcagaatagatatcaaatatagttccaaagttacgatcagaagtattaagactttcaactacgttttgacttgcttcaggtccggttatagctgcacctctcatattaggtaaattacttccgacagatattactcctttagcagttggccaaccaactactttataatttagtggtaattttaaatggcccatcaatggtttatatgatacatcaattaaacattcattattaacagttttagaatcatattgttgaatatgttcagctaaacaaggccaacctccagttcctctatttgtttgaacgtacatacagtgatagttttgcaaaaatgtaaaagaaccaacttgatggtgaggataatttcctgcagcaccaaatgcagcatcgttagttgaatctgcaccataataatcagcaatcatgcctctatatccatttgtaccagttactgcaccatatttaggagcagcagttgcagtaggtatcattggttgatcagtttgaaaagcagtaaaagaacgatctaatccccatccaagtttatttaaacctattgcagtttgaacatttgatatttgattcaaagtagcttgtttagtagcagttgcactagtctcaaaagcaattctattagatcggaaaataactttaacgttacattctaccataacagacccattaggtaacaaatcgaattctgactggttcatataaaacggtactttttgccatggtacttcagctaaacaagtagttaataatctatttaaattatcagtagtaccagtttgagcaataacattatttgcaagaccaaagatcataaacttgtgacttttagaataagtactgaactttttaccaaaattagagaaaggtcgaggtatagcataaacttcttgaccttgagtattaccaccaccagaggatgtgccttgaccagttccgggtaaagacattgccattgtagaatctaatgcagttgtagcaccagcagaactaggaacttgagctgaagtactttgagaagaaactggagcgttatgagcaccttttttagaaggaccttcttcaactggagaatcagctttacgtttagttccctctgacatggatgaatctgaaagagttttttcttctgtgtaaaagtcctcaggtaattgaattccagcgaagttactggcttggttttctctaatccaatcagaccagctacttaagtatttaggattaatttgacgggacatacctgaaacagaagggtagattactccactgtgtttttcgatagcttgcttagttccaattccaatagctccaatagcagctccaaaagtgttaccaggagtttctttaaggttgattgcattaactatatgatctaatgctttactaacaaatttactgtcagcgtcacttacttcttgacttgttttagctttatcgtatgcttcgtcgtgttctttagcgtctgcgtcaatttgattaacaggttctcctctgtctagagagtttccaggaccaagatacttatatccaggaacagttaatcctcttttttcagcgtctaaaactttttgactcttagcataagagtatccttttccttgtggatatgcttcacttaaaccagctagtcttctattgtggttgtaataacgtaacaaatcacttttttcttgttcactttctacttttaaatcctcaggaaatgctctatgaaagtctccttgaaatatacctcttcctatttgtttaactcgttcagatataggacgtttttcttttaatggttttccttctaaatctgtatattttccagttaagacacttttaaaaacgtgacgatttctatataataaatcagcatgtgttcctacagcaccagctaatccagcagcaacttcaggtataccaatagatgcaccttcttctgcagcagttacagcactttcacttaataaaggagttctttcaccaagagtaccaagttcaatatcttcagaagcagtactttccggtataatacggtaaccaggccgcgcgcgatgtattaaccctctcgtgtagaaagacatactgactaaaaatagaacacgtggttgtttatatacccaatggtccgctggccagcagtttaagttgcacacggcactaccagcttcgacgcgagtttgccggtcaatcgaggtcacaataacaagataataaaatttgcataaattaattcaaggtttgttttcatgctatctctttcacacatattgctatctcgctctaacagttgctatgttgctatctcactcgcacactattgccgtccttcactaacatcaggtcctggtgttccaccttcagctccaaggtcttcggatcctctccatcatcaggtcagtagaccatcagctcagaaggtcaaaggtcagtagaccagaaggtcacagaagtaggtcaaggtcatatagaaggtcaaaggtcaaggtcaccgtgacgtcatcaagtactctatacatgctgagtacttgcttatactctacgagtattgccaccgacgacgacgacggcagtctcgccgcttcgcggcggtcggcggagccgacagactgccgtcgtcgtcgtcggtggcaatactcgtagagtataag

SEQ ID NO: 164 - DNA, 3893 bp, Mosquito densovirus BR/07
  source 1..3893: mol_type = genomic DNA; note = Mosquito densovirus BR/07 - NC_015115
gaactttgatataagtccatattccatataagaaatattatttcgtgatacagatactgtaagatacagtttctattagaaacgatgtattacatctgtatcttacagtatctgtatcacgaaataatatttcttatatggaatatggacttatatcaaagttctatatggatcactggaggtggaaaataagagagaaacataaggtggaaaataacttattctccacacacaaatacatccttaatttccactaccacatggtccacccctatataaggagtacaaaaggagggccaaatcgagtgatgaattcagtctgcgttgaacattcgccgtgtgaacacggaaatctattttgtgagtgcatatattgttgggagcatgacggacagtgcagggggagaaaattggatttgggagcatcaactggaatcgaaggaagattggccaacgataaccaacaaccagggctctcagatttatattgcaccgagacaatacatcttgcaactgcaataccagaaaggagaaccatcgatcgagaaaattacgtcaaagatttcgctggtcaaaccgttggtgacctctacccacaattacaaggcagcaccggagcctctgaaccaattgatttcgcatttccaactgttggctcaggaagctgggaaatacttgtacgtgaatctcacaaacatttcgagccaaattatacggaagaagcttatcaatcacatattagaagtgtacgaagaaaattattccccgaagaaactatggataataacgggtcacaggcaagcacgaccgaaatgctacgagacgctgtccaaagatgcggttttgaaggccctcctaacagcccaagcaaaaataacagagatggaattgatggaacgtgtatatcaaccgtggacatacaaagcaattgtattgttaacgcacattgcccaaaacaaggaccaagcaatcaaaccaacaagagaaagaaatcaaccgatacaacagaatcaagtggatccaaaaaaaataaaagcagcaattatcaacaaaatttacaagaacaaggcagtaccagcatctccgacacaatcgatatcgtcgacggagagttggatggatcaactggatcgaatcgagaaacagcatactacacattcgtcctccacaaaaacaacgttaaagaggactggagatacatcgccacaaccagggccaagcaagcgccgagcttcatcacattcgatcacggagaccacatccatatcctcttctcctcatccaatacagggggaaacagcacaagagtcagaaccagaatcaccaagtttcttagtgcaacaagcgcaggaagtgcagaagcgactatcacgttttccaaagttaaatttctcaggaactacattctctattgcatccgttacggtatcgaaacagtcaatatctatggaaataaaatccaacaacaattaacagaagcaatggatacatttaaaatattatttgaaaatcgagacccgaatgacgtcatattagaagccggttgcaaactataccatgaagagaagaaagataataaacaaaaaagatgcggacaaagaaaacaacaaaatctaacagacattatattggaaaaaattaaagaaaagaaaattacaacggctcaacaatgggaaaaccaaatagaaccggaattcaaaatacaattaatgaaagagtttggattaaatgtggacagttatgtaaccagaatagtacgaatcgaaagaacacgtatacaacaattgataaaggcaaaaacgcttacggaaataatgcttgaaatattaaatgatgaatatataaaacacttcacaccaggagaagacaacagcaaaacaacaaaatgtattgaatggatcgaatatctattcaaagaaaacaacatcaacataatccacttcctggcatggaatgaaattataaaaacaaaaaggtataaaaaaataaatggaatggtactagagggaataacaaatgcaggaaaatcactaatattggacaacttattggccatggtaaaaccagaagagataccacgagaaagagacaacagcggattccaccttgaccaagtaccaggagcaggatcaatcctattcgaagaaccaatgataacaccagtaaacgtcggaacatggaaattattactggaaggaaaaaccataaaaacggatgtaaaaaataaagacaaagagccgatagagcgaacaccaacgtggatcactacagcaactccaataacaaataacattgatatgaatgagacgtcacaaatactacaaagaataaaactatatatattcaaaaagagtatccaacacagagacgacaaatatactataaatgcgcaaatacaaaataaattgatcagtcgtcctccaactctcattgagccaatacatatggccatagtgtttataaaaaatttcacaaaaatatataatctaatcgcagaagaagacaaagcacatacggtaaacgaaaaggcaatacaaatcagcaacgaagtgaaagaagaagcagaatcatggcagacagcactacaatggaccatgacggagaacaacgaggaacaaaacgaaaacgagacgcaggcgctggaggatcaggtgctggaattggcaaaggaacaagcaactacgtaaaagaaggatacggacctaatatgagcgaaatgataccaagaaatattatgaataaaggcaaccacacggtatatcacgtagtaaagcagcaaaaatacttggacttcaactacgtatcaaatcaaaacccatatattattccgtatcaaacggcaggattctgggcatcaatgtgggaccaaacagacatcgaatcaaataacacaattaatataatgaaagcactaaatagtgtatcagtaggggtaacatggatcaaaggagaaatcacattcgaagtatatgcagtaacgagacaacgcttgctaacgggaacaaccaatcaaactacatgggactttgaaacaagtcaaaacatgttcatcgcagatgcagacagagaaccagaaaatttcaacttggcaacagcagcagcaactggaccactcgcacaacaaacaacacaaacactactattcaatgcaaacaacgacagatatacaaaatatgaattaccacaaagaaaccaatatacaagagaatatgacttccaacaacttacaaataactacatgtggaaaccaacagacatcagcgacgcagcaaactttagaagattgatcccgatgtcggaaggagtatatacaactacagcggcaacaactaaaatggcagaattgacacaacaaaaatcagcatatgcaacatcaggaaaaacaactgaagcatcactatttagaaatagaacatcataccctagaatgcatttggcacaaccacaaattccagacgaaaccggatacatgaaattcagataccaagtacgaatgagtacaaaactacacctcgtatttcatctatacccagattatagtacatcaacaaacgtagaatacatggggagacaagtattggaattaccagaagtaacaaaaacaggaggagtggtaacatgtatgccgtatgaaatcaaaacttaaatattatattcaacttgtatcaactataacacatatataatcaataaagcattcaaaaaacatataagtcaaattaatatatatcacaataaaaatccaccttaaaacataagcttaatttccacctccgtattccacctaagaaatattatttcgtgatacagatactgtaagatacagatgtaatacatcgtttctaatagaaactgtatcttacagtatctgtatcacgaaataatatttctta

SEQ ID NO: 165 - DNA, 5499 bp, Myzus persicae densovirus 1
  source 1..5499: mol_type = genomic DNA; note = Myzus persicae densovirus 1 - NC_005040
gccccccgccccccggaagtaggtagtggttattattagtaggggatctttttatataataaaaagatagcaggtatccagtaggcgactaggtgggggtgacgtcatcactatttactcaagtgttttgttattcggcgtcaagtgttgtgttgacacttgaaaagtggcgtgattgattatttacaagtacgtcagataagataaacacaagtggtacttgactcggaatatataatgaagtgtggaacctacaacaatatcagtactcatcaaaatgtcaaactcgcaagaagtgaaccaacaacaattcaacgacgaggaggaaataccatgtggccaacggtatcctacagcgggacgattcaaacggaccaccaacagactggcgtgaatggatcgaccccgatgttcgaactcaaatcgacagcgcgcaaagaatatgggacagccatttcagcggacaatggcactgacactgaagacgctgtgcaaagtgttggagtgcaaggcaacggaactaacgggtaacatgcattattcctctgatcgcgttgctattacccgaccatatgtggtcagaggcgacgagcagcgatcgctggcgataccgactgagaaatgcgacctactggatttccaatccaacgcgggaatccgaatatcaggctttactacgatggatggaggagaaaatgccgatacctttagcgaaatggcaaggtgcatgtctaccgcggtatggggaggcaatgtcagatatgtttctgacatccttgtacccggaggaaattggtcaattaatggaattgttgaggacctacgccggagtatcgcagagcgaatgccaaaatgcatgtacgtcgtcagcgaacacggcgaccacgtccacgtcgtacacacctgtaactacgccacgggcagctgtagatgtagtttcttactcaacgccgctgctttccaactatgtagacgacgacgcattcgaaagaatgttagagtcatccaactatcagaaagagactggtcccgtatctttcaatacttatgttcatcgcccaggaatgtcaaagaagtgggcggccagtactttgatggaggattacgtagtagatattcacatatatcagttagtattgcgtaatttttttatatacttggattggttgacgggtatagaagcgaatagatgcgtttcatatattaaaactggtatgcctggcaggagttacgttaatagcgtgatgccaaaaaattattggcgtaatcctaaagaatttcacttagcgcttgataaattagagttgctcgttaaacgacatttcggtgatttcacgtgtttggaaaattttttaccgcaatatcgttggcataattgcatcacatggtttgtgaacgtgatgtcctgtccgttggacccgtggactgtcgaatgtgctggttgtggttttcaacatattcctaatatatctaaatgcgaactactacgagactatccgttcatgaacgagggcactataaatcatatattaatcgaatgtattaaaatttacaaacaggaaggatcaaatacagaatgtcgacccgaacgattggtggaaacatgccttctgcagggctcgggggagcttcaatctgaacagtccatacgtgaaaatggccaaaaccatacaacaggaagtgtttcgcaggatgaccaagatggagtacaagataacggatccacaaatgtttttcaagaagaagaagaaggcagccaagagggcccgcggcaaaagaagtcgcgacggaagcagcgattccgaatgattagggaaatagatgttagtaaaccgcaatctatcgaagaacttatatataggtatccttgttgccccccggaagctttctataacattcccgaattttacgctaatacaaatataaactggatagacatgaaagattttaaagtaacgataccgttacgtaattgggcggcgactttacgcagatggtctattcatgatttcaataaatattataatgactctacagtttttccatatttcaacgcgtacggttcagatatttgcaatatgtattacagtatttcggagagtttaacaatagcaaaagaattactcaactatcaatttggcgatgaccctgaagtagtaattgaatttttaacaacactatataatgtcatagacaaaagagttccgaaattaaatagtatatgtataaaaagtcccccttcggcaggtaagaacttttttttcgatgccgttgcatcgtatttgctttcatatggtatgttcggtacagccaataaaaacaataatttttcgtgggcagacggagcgggtaaacgattagttctatggaacgaaccaaactatgaacaataccatatagaaaaaataaaagaacttttggggggagatacaacaagaatacatgtaaaatatgcaaacgacgttagtgtgcaaagggtacccattattatattaacaaataaccacttgaatattattagtcacccagcttttaacgatagattgcggagttacgaatggatgtcagctggcttcttgaaggactacgataaaaaactgcatccgcttatgttttatgaattacttaaagattatggtgtaataaatgataacaatatgattgattaatatatatatatattgatttttatttacgtaaaaaatctacaggttcattgacaatgggtatattcattgaccttcgccacaatgttaaatcacggcaaaaagctaaatatgtagaatatgacttgaacaatcgttcctctggccaccaattcggattattgtagtcgccccaagaagtgttcatgatttcttcggttgtgggtggagtagtggtatatcgatgcaaattaattagggtttcttttgacgcacgatcactttctctgtaaacataattgggtattttaataggtgctttgactcgaaccctcatggatgtttgacgcttcaacctccatggggtcgtcgtcccatatttacccgaacagacgtaggtacaggtgtagtgacagttgcgtcgactggagtagtaaatgaatcaatgttctttgtagtggaagctttgcccatttctttagttagtcccgaagagtgtgcagcggcgttttgattgtcagctactttttcaggagccacgtacaatccgtgaacaatagataaatctgcacgattgtatagattttgattgtaattgtcgtcagccagcaaccatgtcttttcgtattccacgtgaagcctgtcaaacgctgttctgctttgcggacatccaaaactaactgtcatctcagtttcgaaatcccatgtgcattctacatcagtaaaatttacagggactatactattagtggcagtagttaacttatgcactggatatattcctacatgtacactaggttgtactttattagaatattcatgtttatcgaacatacgaaaatattggcctacgtctatgttagtacaatatctatcattgccaaatatgcgtttccaaccgttttcacccacaaatgtcaatttttgatccgatctcctttcgaataagccactggcagcgtttataaaatcttgacactctggttcgttaccagcattgcgtaacatagcaaatttactggaattaggctcctgtacgctgacacatgcatcgaatattggatcgtgtggtagagtgagtataccgacatgaggcttgtacgaataattaagtacagtggtgccgacagtaaacgaagcgtcaaccttggtgatgtgttcattaaatcgttcccatccaagttttccagaattatgatttctatttacaaaattacaaaaataactgttatacatcaacggtaagttcatgtaggacgcaggcagttcatatccctctttagcagagaatgtaccatctagatcttgaccgtacaatttgcgaacgaattctttcatagacgactgatcgttctcggtattcgttggatccatgggctccgatgaattaccaaatgtgagttttcggttaaatccccttgtttttaaattcaaagcgtccgcttttaccataaatttgttctgatttaatgtggccagggagctcgtagagctattggtttcaaaagctgtgcgaggattacgcatgacacccttgcatttgacttcagtgcatatagcacctctgggtaaaaatttaaactcggacggcgacatatagaaccaaggttggtccacgggcacactcattaaactcgttgtcccaagataggcgttatcagtgttaagatatcgcaacactttccaaccacatccgtaactgatgaaagtatgtacttttcggtaaaccatagtatatcctcccgtgtgaccgattggcctaggtataacagcgttttcagagctaggattgccagtatctgggtccccatcgttcgcagcagccgtcccaggaagcgaggtgccacccgcacgtttaggagcgggttcagaaccggagctatcggcaggtcgtttgctacccgatccgctagagcttgccatggatccagatgcgcttcccccgttgccgttgctagtgctgttgtccggggctgaggtgtttgccacgtggtcgccactcgcttcaccgctgttaggattgccgttaccgtcgtagtcccaatccaaatcaggatcctcctccacgccacctaaaacatacggtggtaatgaacgacgtgctaaagccttattgtattgttctagcgaataacgctgctgcgatgaatttagattttgccaattgggccgctccggtggaggaggacctaaataacgaaattctcgcatacttacggctactgtctgctgccgctaaatacggtgttgtgtcaaaatatgttccgctagtgttaggtttgttcgggtatattgctgtctcgctgcctgtcaagaactgatcggctaaatcgacaccacgctttgcgatcaatccgagagctgttgcaatgttgccataatatgggtcgctgacttgcagcgctccccgtatcgcttttttgtctaattcccatatgttatccttgctaacatccgtagcattaaaataatcggcatcgtgttgaaatgcaaccttatctatatcactagtaggtaacgccttagcattaaaatgaccttcactgtcacacaacaaattacctggacccacgaagctactaccgaaccacgtgatacctttattgctagtacctgaagcacctaatttaatacgttttctctcgttattctcctcttcaacactataaaattcgtcgtttaccgacgacatgttaaacgtaactgattaaatataagtaaaatgtaaacacttgagtaaatagtgatgacgtcacccccacctagtcgcctactggatacttgtctatctttttattatataaaaagatcccctactaataataaccactacctacttccggggggcgggggg

SEQ ID NO: 166 - DNA, 5053 bp, Papilio polyxenes densovirus
  source 1..5053: mol_type = genomic DNA; note = Papilio polyxenes densovirus - NC_018450
tattctcaatatataccaccaccactcccccataacccatgcccatggacattatccatttacgatgtccacgacgcgcgaagcgcgtcacttcgtgtggacacatagtatcgtaaatggataatgtccatgggcatgggttatgggggagtggtggtggtatatattgagaatattttttctagtctttcggttttcaagtatagtgtgacgtcataattggcgtacgtgaccaactgcatgtcggattgttatttaggtggtggtggtaatacataaagatacttgataaatatgataaaagataaagatagatataaatggagtataagaaaggatacatgaacaatgaattcacagtgcggagcatacgagttttcgtatacagatcaaagtccaatagattgggactattcaaataatttacgctgttttattgaagatagtgacgaagaaaacgatataaaccatcttaaagataatgctaacgttgctcatcaattattgtctagtatggagtcttttgaagagtcttcagacgaaattccaagtgaaacagaggcaggaatacttgaagaaattggaagtcgtagtcaagtcagtaatagcagaatgggaagaggcacagaacgtatgctcaagcgaaaacgaactagttcaattcttaacagaggaattctcgctatttatggaaaaaaattacaaaaacgactcattggaaaccttgtgcgatactctggaagaacccaaactaatacaatcaaacctacaaacgatgaaattgtacttaactcgtatcttacagaacaaagcaatggaaactacggacttgaaaggccattccctattgcttatcaacaaatggaactatgccatcaagactcctatgaaactcctgacgaacgatacagaagccttagccagttctttgcagcggtggaacgaagaatgggaatccttgccactcagttatgcgaatcttataaaattaatagtacaaacgcaagaagaattctacacgactccatcgaataccgaggaaataaagcatttcgtgaagtggtttttaacctcaggaaagtgcttgacaaaagaggttcgtacgctatttggttccatgaaacagacaaataccaagaagactatccagaagacatctgtagaggatacccgcccgactacgatttcggagtcatctcaacaggattcagatacacaggaaagccagttgtcgaaccactcccacgaacaagagatagaacagagccaataccacatggatcaagagacacagatgcattcagggtatacaagtactacccagaaacgaaagtcttccacgaccctgaaaggtcaatttacgaagaagaagattttgaagaaccaaccgagggccatttccacatattacacgcctgccagtggtacaacaatgaatgcaggtgcctcggaaggagctttgatgtcaatccaaggaagaataaggcaatccctatcgcaccgcttgacgaggaacacatccgcaacattatgttgtataacacaaagtggcccagatggcctgtgtacatcaaagtggccaacggacccgaatacgaatatgtttatagaactgaatctatatccaaagaatcagtacaacccgagcgacagtcgcaacaactggaagagagcaactatcagaatgaaagtggaccttccgggcaacagccgtcacgcttaccaaataaaagagataatagatgctcagatgtcccgcatggaaaatcatccagaaacggaaacacagtcgaaaaattcgtggaacaattcaaactcaggccaacatggcccttggaacacatattagacacaaaagattggctagaaagtgaatggtgtacatatattgcaggtgacaaacaaatacaacgcacatttcagatacttatgaaaataactatgaatatgacttttgaagaattaagaatgctttaccaaaatgaaaatacaatgcccatatggggtgctacaggtagcaaagatttgttaaaaacttacttttcactcgatgaatctgaaacaatagtggaagaattattggattaccaattaacaaatgatcgtctcgaatattttgatgatttatttgatgcaaagagacgattcattactgatctatatgaaatattagaaaaaaaacaccaaaaaacgaacacatttcagattgtaagtcctccgagtgctggtaaaaactttttcatagaaactgttttagcattttattggaatactggtgttattcaaaatttcaatcggtatcacagttttcctcttatggaagctgtcaatagaagagtaaattattgggatgaaccaaactttgaacctgatgcaactgaaacgttgaaaaaattatttgctggcacagcattaaaagcatctgtcaagttccaaaaggaggctaatgttcaaaaaactccagttataatcactgcaaatagagacaaatttacgtcagaagtatgggacgatcgtattattaaatacgaatggtatcagtgtccaatgttaaaaaaatacacaaagcgtttacatccttttgtatggtgttatctagttgataagtatgtacctattgaactaatctaatcttatcattgtttataaataggtgttggtttcaataaagtttcatttatccacatgcctcgtattcattttcctaaacataattatcttggtcctggtagtggtaatttcaatgtgccaccagttgatgaagacgacgcaatagcaagacaacacgatttagcttaccaacaagctgaaaatcataaagacatattcaaggcagacaaaactgcgagagacgaattcttcagttcatttatacatagtggaaatgttcatagtctaattggtggactaggattaggtgccaagaatattcttgaagaaaatgtgttaaatcattccgtatacggaatgggtaaaaggaaatcaaatgaaaaagattgggctacaattaagcgtattaatcgtgcacgagcagcaagaagagaaaatcaagaaaatcaacaagacataagaaattttggacacgttgcaggcgaaaatattgaaccagatcacgaagcaaatttggcagattttccggatttcctccaagactttgtagctgaagcaggaccaagtggaagtcaaccagtggaaggtgcatacgaaaacaacatgaccaataataacgttgaaatggaaacacaaggtgaggcatcaccggtagcaggaggatcagcacaagttgatccacgtacaggaggacaagcagccggtggaatgggtgcaggtggagcagcaaacgatggacgtcaggacatatttagtggagctcctcagcctaatcaacatcatcaattaatatatgggaaaagctatcactttacattaaccaatggattaccagattatagacactttgtggcaagtggaaacaattacattgcccaacaaagatttaaacatatacacggaataccttgggaacgcttattaatgtatgtaagcgaaggagaactagctaggttattcagagattacacagctctcaaggttgaagaagttgtatgcgagatttatagtttaggagttcgtttaccatttgttacttctgccacaacaagttctgtagcaaatgcaaacgcacaatatcccattggatgctttcactttgatgaagcatatgagactaattattctccaactaatgttagtgatataattaataaggcattaggagcagaatggaaaaacgaaaatagacctgcacaaattgtaactacaaactggtcagaaacgtttccaaatataacagcatctgcaacaagtcgtgatattagcaatccagtaattgtagactatccattaccttttctgtataataatacaccaaaagatgttggaatatatgattatgtcgacataaagaatggtactactgcatatggaaaatgttgggaaaaacgatttaagccttcaaatggtattttgtatgctgaaagtaccttaaaaggcaacgttgctacatctgaagcagccacaaatagtaatgtcatgactcctataccaggtttagaaaatggatattttataaattctgcaaatattgctgaacgtaatgacaatcaaacatttgttcctcctaaagcgtattcagcaacgaaattaaatcaaaccaataccacccaattagctgcctatgtagattatatgggttataattattttggagaacaaaaatgtgcaccgcaagcaatgccaaaatttatgattggctttgtaaacattcgtaatgacgacaattcattactaactgcaaaatgggacattttaataaaaactcgaatacatttgtctggtatgcaagctacaagagaatgggttgcaagaactgaacgtataccaccacaatggttcacatcgcaatacactcaattccgttaccaaaatataaatctacaaggattattacgtacgggtaatacggcaaaactaccaacaaagagaccacaaatgcaatctaatgtaggcattctaccaatatcggaaaatgctaccaatcaagaagatgatatgattaccgaacaaaaacgtcttagacataaatctgcattgttacctttattagaaaaacctgtaactagatctaagaaattattatccaaataaataaatacaatacatatatctatatctttcaattattttatctatatctattaatcattattacttaaatatatctaccaccaccacctaaataacaatccgacatgcagttggtcacgtacgccaattatgacgtcacactatacttgaaaaccgaaagactagaaaaaatattctcaatatataccaccaccactcccccataacccatgcccatggacattatccatttacgatactatgtgtccacacgaagtgacgcgcttcgcgcgtcgtggacatcgtaaatggataatgtccatgggcatgggttatgggggagtggtggtggtatatattgagaata

SEQ ID NO: 167 - DNA, 5166 bp, Parus major densovirus
  source 1..5166: mol_type = genomic DNA; note = Parus major densovirus - NC_031450
cttggcttatgggcaagcaccaagtaagggagataaagtgaagtgtataaatagtgttcaacatgtaagtagctcattttgttgttgtatttcgtgcagtgcagtaatactttggtttggtaagtaggtttaaacataagaagatatatcaccctcagagcttgtatgacattactaagaagaaggtaagagaggtgtacaagaataattggaacgagacgaaggtactaccgaagactatccagagggaactactactagattggttaagatgtgacgagacaattcctgagagtgatgacgatgtggaacgaatagtggcacgtatggaaaggggatgggaggcattgaagccctttggtccaactacatttgtgtacttgatgagattaccagatgaagtaccgccatttgcacatgaaaggaatcatatcatttgggacttctatttgtggtatgaacaagggcgagaaaagaaaatttgtgaaccgtgttattccgggaagagtcgtttctaccgtccaggatctgctaatgaatggttagaaaaaggatgggtatttaaacgcgtagagaatcactccatgattgatggggacagattgttagaggatttgatatgggatgaagacaactggtgcagtttatgtattgttgagccattatggatccatatatttgatgatgatgattgtttgtttgattatgactatcatttgaagagaaggcgtacatggagtgactcaagctctgaggacagtgatattgattattgtaaacatactgttatgcaagggattcgtatgaaccccactttgtataaatttattaatgaataaagcaagtgttatagaattgttgttttattgcagatgaataatgacgaccacttttgggaatattttgacagtactctgggagatgcttccggacgagtgggcgaatcatccgggagtatggtggaagattatggatacgataccactggaccaacaatgcaagaatgcgatgttacagctaatagggcgttggagcaagaattacaaacaatggtcgaccggttcgttacccgccttgaaaaagaagattggcaagacagcggatactatgtgtcagatgtctttgcctgcgaatcaattggacgagctcaaggattggctaagcgaatggctgaacgagcgggaaatttccgaagaggacttatcctcatatctattcacagcgatcaagatggcggtgcccatatccacaccatccacagctgcgcctacgcaaacaggtcgtgcaggtgctacttcaaagcgttccccgaagcgcaagaggacgctagacgacttcttcgaaagcctccacccatcgaaacgttcaagcgaagcgattgggaaaatatcacaaagtatttttgtacgaaagggagacgagcaacgttcgctaaaatcaacggtgccatacaaagacttcctcttgaaattacaaatctatccgacattatcctatcaggccaagttgaaggaggatcacactcaggcctggagaactgccacgacccgcttgacaataacaatgaacgaaaacgaggaattgaaccgaaaggtgatggaggtactcgaagtcgcaaaagaagaggtgttggcaacgcaggaggagatggaggaatcagaggggacacaggagtaattcttgatataattaagaggtatgctgtttgtccattatctgagatagtatatactcgcgagtacttggaaaatccccttgcagttaaaaggttagatgatagggatgtaaagaacgctatagattgccatgctgctattattaatacttggaatagagaggattatgttaagttttatgaggacccaaacactgttaaaatttggagtgcacgtaatattgactcggtggagttatattatttaactgataatgaatctagagatattattaataaactgcttgattatcaatgtgggttagctaagaaacagtttgtaacggatttgattaatgtaacagacatgaatattccaaagtgtaattgctttctaattgttagccctccaagtgctggcaagaactttctatgcgatgctattaaagattactatattaatgttggacaaatgcagaaccctaataaatataataccttcgcgtatcaggattgtcacaatagacgacttcttatttggaatgaaccaaactacgaacctagggaaacggagaatttgaagatgttatttggaggggataacttgtctgctaatgttaagtgtaaacctcaagctaatgtaaagcgtactccagtaatatgtatgagtaatgttgtacccagatttgctaatcatgaagcatttgctgacagagttattacatattattggaatgctgctcctttcttaaaagaggtaataaaaaagccacgacctgattctgtaatgaatttattatatgaaatatacaattcataattatggttttacagttttaatcatttgcatcctgccatatacattaggattatcatatactttagcaataggacgaccatcacttgcaaaatattgaagttgagatttggtattggccgagtaacatccgcccttaatgtatgtgtaagggtcgacactctctgttgttagtacacaatcaacttcgaagtagccttgtgcgtctaaccaggaattagcttgagtagtttcatcaatggtagttaacttgggaacagctcttatgccaacatttatagatggcatttgagtgtcatgtactgtctcaacatttacctcctcgaatataccaccttgttcaatagggactcgaagatagttctgttcctcatcgaagaatgttgtatctgcgtggggaccctgtatatatttgcgaggtgcattacgtacttgtgttggtgctgtagcttgtgaggaatcggttgttttcgctgccgtcacttcattctttgttcccgcaggataactaccattataattttgagtaatcaagttgtttggtactggtgcaaactgtggtaccagaggtgcgtagctaaaatcgtaatccatagcaactacatctgtgttgatacatgcacttgcatcgaattcttctataaagtttttgtatggtggaaaccccgccaatatcttagtaccagtagtagcccttgcatcattagtgtaaatggttaaatagtcctgtagatatatctctgcgccagttgcatctgctggtggtttcttagcaaagtctgcactgtcattatcgtaaccatacatagcaatcttgagaccatctcgatattggtaggatgtcaaggttgcgaatccagtaggttgcatgggttcagtatcagaatatgtatactttctgtttgtagagcatataaaaggaatactcctaatccccttagccacttgtaagaatttattctgatttagtgtagcattagctgtttgagtatctccagtttggaatgcaactcttgtgttccacgtcctaatacgtactgacgcggacttagcaaacgtaccaggatagttcttcattctgttatattctgctggactcatatagaagaataagtattcccatggaattgatgccattcctgtcgttagcgcccatcttgctggtctttctccgctggccgcttcagccaatataacgtttgcatttgctgaagtcagaaacctccatttctttctataagtttgttgaaacttctcaacatgaagtccaattggacgtaatatagctgtagctccgccttccccactacctcctctaaccatgccatctaagttgcctccagttccagggagactcgtccctgatttggataccttactcggcggtccgccaccaccactacctcgcttcgatccaccgctagaacttgatacttgagacatttctatgtccgccatgtttggttgtggtgcgttacttggtccggcgtctcttaaatcttgtctatctcttacttgttgtaaaaaatcgtctactccgtcttctgattgctgactgggttgttccgcctcctggggtgaccctaaaagatccaaatcaaagttatcaatcgcatcagcctgagttaaaggtaggtcgtcatccccaggaggatcaaagtattccccacgtcttactctagctaggttccattgttccatagcataacgtctttgtccctcattcatactatcccaattaggacgatcctgaggactcggacccaacggtctaactctaggcattgcttaccgtagtatacttttccgcttaaatgttcgactgcgtgcttaactcccagcccgattcctcccactgccgcgtgtaccctagatataggatcctgaccctggattgcctcgtgtgcgaattgtgagattgcttctctatccgctgacagcacgtcgctattgctcttagcttgttgataatgtaagtcgtgaccctgcgcaataaggtcagctctgttggtcgcgggacgtattgaatttccaggtccgatattgttcgaaaacggtaaaactagtccgttccgtggtggttctccccttgctcgattggcagaatctcttctcgcctgtgcttccctttgttcttgcttcttcgccttgtttagtcccctgcgaggatttacaagtctccagtgttctgggtatttagccttagtgtccttattccaaggatctccgtacggtttgatcttctcctgtcgctctttcaaccccaaacgtctcaattcccaaggaacggctgcgtagtaatcgtctcgattaccaaatattgctctcgataaagggttgttagggtcagctgctgctcttcccaattgcccttcgaatattggttgatattggctacctgctccaataaccgcacccccaacacgtggtgtattaggtactctcaatttactgtcacttccggcactggagatactactattagacgagttaataggaatagatacgtatccacccctacgtcgcacccctgtacttgtactgggttgattaaacacactctcttcactactgctgggggtaatagtgctcagctcgatgtactcggacatactgactggaaataacctgcgcatacatatttatatccatgctgatcccccttacttggtgcttgcccataagcccttggctt

SEQ ID NO: 168 - DNA, 6321 bp, Penaeus monodon hepandensovirus 1
  source 1..6321: mol_type = genomic DNA; note = Penaeus monodon hepandensovirus 1 - NC_007218
gccgacgcaccgcccctagctccgcgataagccttatcaggctctccgcctacggcgagcagcgggccttcggccccccttcggggctgctggagcctgataaggcttatcgcggagctaggggcggtgcgtcggcagacccctatatattggtaaacctcgggtgtgtgacaagagtcctctccgattggtctagcagtgaagttctcagcacgatggcgagcaaaggtgactattattattttactcctagagatctagtgaactttgtaaataccttgctctgtcataagattaatgctatagctgtgaaaatgctaaccatgaaggaggaggatttcttgagccaagtctggttgccatacatacaaggctttcagacagctcatgacttgggtagagacagtgataagtgcggtgcggcgggggatgaatttcaagaggtttttctggatgaacgtaaattcatagatttcatgacatctttccgccgcagtgtatttatcagctatggtgacgagtggagacatagatcatctcactttatggcagatgtattttggagtgataatctaaggcaattttggatgatgatatttggagagtgttttcacgtaaatatgtcaccatgtaagagattgtatgtagacatgttaccatactattatttagcaaagatgactacggaaaacagacatcttatagaatgggaatacatgaatccatgtcctgccacacatgtgcggcggaataagatgactggtatgaacttttgtagtcagggagtagttatagacaacgaatatccagacaatcagatgggttgttacaacatagacgaacatccattaccaggaggtattagatggagtggtaacacagaatatcgtacaggttatgtacacgttaataaggtaaaatggttgggagttacagataaagtcagtgacatggaggagacttccagtgatgaggaggtgcctagcagtcaggagaagtatatgaagagtaaggagaagaaggaacagccaaagacatcggagaagaaagacgatgagccagcaaacaagaagaggaagttctgcctcacaagcgcagctctggagaagcagaagttagaactgggaaaatttttccggatggaagaggagccgatcaacatcaaattatacgacttagaggaagggaaggaacaccacgtacatgaagctatacgtatcgatggtactaactctaagtttgctaagaagaaagacgaacatggtaacgttatcgatgatttcaaggtaattgtttgtgatggagagaacaacttgtatggtttttttgctaacacacagttgaacaaattgtttaacaaatggcacagtacaaagaaatatagtatgaagccagaacacaacataagcttaaaggtttcacagattcaggaggttaggaatggaaagatgtgtattgtaaagatggccattaacgatgatgtaaaatgtttcgccaggtaatgaagctcaagagagaagggatactggatcataaccctcttgttacattttactctggtctcattgtaaagtttgaacattggaacgacaatgtcagtaaagtaagaaagtttgtgtataagtttgcacagtggttgtataaggaatgtacatacatccacaacataagtgctgcagttcatgatagatgtaaggataattgttgtaaagactcagccaataaagtatgtaagaacatatacggtcctcatttacacattttattggagagtgtcaatgaaaattggagtaaaagtagcaagagggttttattccgcggctacgagaagatacttcaacacgacaacaaacaactatgggaggacctaggactacagaagacatcgccttcgtcgatgagtctgtgggatggtgagatgttcaagtggtatatgttcagggacaggaaatacgcaagtgttcatggaacatattactacagtagcgatgcggagttcttgaacaagttaatgaaaatgaaagacactcaggagagggacgacttgtacgagaaagcttgtcagtttaagagggataggaatacagcaaggaagattgaaaacagtactgctaagacattagatggtggtgaaaacaatgacaacataagactaagcagttctagggctatatacttagaaaatttacaggtattggagaagtatctagtaaaacataaatgttacaccattcaggactttaagatgatgcagagaagcgacgatgagatttgggtaaattacatgtatgacatccagaatctagaaaaagtcatagagaagttaaacattatggagtacagtctacaacaggcagactacatagagggaaacacatggataggagaagatttatggaacactaacagtgcatatatgaagactatcaagaggggtactgataggtattactggtacattcaaagacacatttcaaacagggccagtttagtcggacagagcagacagatttgtatcgacggggcatacatgatgtttaagataatagagaacatgaaggtagagtcgaggccaaagacaataccgatagtaagcaagaataagacagtacagtggatacaagattttatggatatcatacacggaaacttacccaagattaactgtatgatgttatatggcaatagtaacagtgggaaaacgcagctgattgaggctctaacgggcctgataaacacagccataatgacaaatgtcggtgatggtggaacattccactttagcaacataacagagatgagtacaattgtagtaggaaatgaaactaagatcaggactcagacaattgagcaatggaagggattgtgtgggggagagaacataacaatgccaatgaagtacaaggaacacaagacacacatgttcaggaaacctgtatttttgaccaaccaacatcatccactggtagagatatcaaactatgacgatagaaaggctatagagaacagatgttttatgtataaggtagaattgggaagcgaggcagtaaatgcacatataaaatttcctaacaggatgattccgatcaagaagaatccagaactgactcagtttatattggcatgtatgcaatatgtacacttgaactatatggacagggcagataagaagtttaagattgggtttttcaacaaactttatgacatgctgtttgaggacagctaaaaatatgtacgagaacgtttgactttcccgggcaacaataaagtgataagataaaatcgtgcgtttgagtatccacatcacacatagaggtagtacaccatgagtctatcatgggagcagtcgtgtcggcagtagctgcagttatagctgtggtaactgaagtggtcgaattcatagtcgatgtcgtggaagtggctttcatggtggcagaggctgtacaggtcgttgcagacacagtcaattactttactggcggcgatagtgctgcgaagaacgatcagagcgatccggagacgcaggcagctaatgaggtcagcagtacagcagaatcgacaaacgtaggaggaactcagggctacatgttaggacccgaacagttggacgattacatagatagagctacagacatagactaatgtcacctacaagaaaaggagggaattattatgcgagtaaacacttccaaagtaagcgaaagaataaactagcgagagtgaaagatttactggcaagtaagaagaaggagagaagatttaaaggaaaaggaaatactctaagtgagaagccaagtacatcagagtggaacgatccggtaagacaaagatttccagaattagaacaggaggagagaaatacatttgcaggattactagcaatagaagcagcaccagaccaaagacaattagggcgcgataataacaatcaactagcactagtacagagagacacaagagtagcagtaagacaaagtacaaacagaggagaagcattagaggtagtaagagcagcaaacgaagcaataagaagtggtggagatagattagcagaattagtacaagcatacgcatcaggattttcagacagcacagaaatagtagaagtaagacaagaagatagagtacagagagacatattccaagaagaaggacagaatttattggctattgagattgcattacaagaaccaagcagtgtagcgcaacagttagaccaggagagaactccagcagtcaagagagctctagaactaacagcagaagaagaacggatagaacgcatagaaaacgctaagaaatatattgaagaagtcatagaagagacaaatcaagaactacaagaacaagagagacaagaggtaagtgcggcggcggaagatacgatgaacaccgaagcacccgtcccgatggaaacttctgaatccggagccaccgccgcaccgcagcaacgagctgctgcgggcggcggcggtagcggaggcggaggagaatctgcagggtacggaaaaaaccccagcgattcattccagcgccaccgcaataaacccgttgatctcaaacacatcggagacaacgtatatgtggctcagagagtttataaggtagaagctgagtgtaaactggtaggggacaagttatcgtggtcaaacacgacaaacagtaaatatctcaggagactgttgggaataaacggcaacagtaactctggagatattaagcacagtttctacacacagctatctggaagtattggtttgggaaatcttgctctgggtaactacataaactcgtggggtatggacaacatatccaagagcgaggacagttgggctatcatagccaccaggggcaagatgaaccatctacaggcatttgagatggttccacaataccaaggagaaactgtagtgggatatacaagtgcaccgctacagtttggtaaacttttgggacatgtatactatccagatcccaaaggtgaagaaaggataaagatagcaagtaaagctgatgccaaagaatctaagatgtttaaggatgcaatggcaggttatctattagatgacgacatgaaccagacaaaagtcacatcagaacacaaccacgtatttgcattcacagacttgagagattcgccagtaataagcgaagtagcagcataccagaccaacgatgaaccaccaaaaataaatggcattggaatagaataccagggattcaacttaacatcagacacaaatgcagctctcattggtctcatgccaagtaactgtataaagagaaggaaggagatacagtcaggtatggacaacgtagtactatggtccatgaagagtaacagactcatagacaaaagattttggaagccagaaggatggaccaaaaagagcatgaacggtatggctaaagacaaagtgaacattacaccaacaacctatgatatatatgaagaagctcacgtaaccaggacaacagattatgcagaatgggctaggaatgaaatattctatgatgcaaacacttcatacggaagtgttggaccaagtgacataggaaattttgtacagaaatacaacttatcagaccaatatgctacagacatattctttatgccatatgttcacacacagagaggcataattcaagacatagtcataaattttgacttaacaatgcaaattatggtcaagagaattccacgtcaagtatataatgatttctaccacatcaacactagagccatgaacccagttaaatatgacagtgcggtagaaagatcattcggatacgacgaaatatatgcaagatccataaaaatacatgaaaacataagtggaactcatggaagtaagtatgcagatagaggaccaataagtcatatggaagcaacaaagaggaactcttaccagagagcatatgcacagagaagaataatactagatcagggtgtatcaaaaatgaagacaagaagtagtgcggcggcggaagatgacattccagaagattgtgacgacttcctagaaacttctgaaatggatccaccgccgcagccgcagttgccgaagaagaagaagaaatatagagttaatgtataatgttgacataatacaaatgtatatatttgagttacaataaaggttataaaaatcacgcgtgcgtggtttacccttcagaaggagcgattctccgggggtaggtagggggatctttgcgatgacactgccagttgcatatatgccgtgggccatgtcatcgcaaagatccccctacctacccccggagaatcgctccttctgaagggtaaaccacgcacgcgtg

SEQ ID NO: 169 - DNA, 6310 bp, Penaeus monodon hepandensovirus 4
  source 1..6310: mol_type = genomic DNA; note = Penaeus monodon hepandensovirus 4 - NC_011545
gccgacgcaccgcctctagctccgcgatagccttatcaggctccagcagcccggaaaggaggcggaaggcgcgccgctcgccgaaaacaaaaaacctaataaaacttatcacaaaactaaaaacaaagcgtcggcagacccctatatattggtaaacctcgggggtgtgacaagagtcctctccgattggtctagcagtgaagttctcagcacgatggcgagcaaaggtgactattactattctactcctaaagatctagtaaactttgtgaatactttgctctgccataagattagtgctataggcatgaaaatgctgaccatgaaggagaaggatttcttgagagacgtctggttgccttatattcaaggcttccagacagctcatgacttaggtcgtgatgagtgcggtgcggcgggagatgattttcaggaagttttctttgacgcacaggaattcattgacttcatgtcatctttccgccgcagtgtatttatcagttatggagataaatggagggatgattcatcatattttatggcagatgaattttggagtgataacttaagacaattttggatgatgatatttggagagtgtttccacatcaatatgtctccatgtaaaaggttatatgtggatatgttaccatattactacctggcaaagatgactacagagaacagacatcttatagagtgggagtacatgaatccatgtcctgcaactcatgtgcggaggaataagatgactggtatgaacttttgtagtcagggggtagtcatagacaatgagtatccagacaatcagatgggttgttacaacatagacgaacatccactaccaggaggtattaggtggagtggtaacacagaatatcgtacaggttatgtacatgttaataaggtgaaatggttgggagttacagataaagtcagtgacatggaggagacatcccgtgatgaggaggtgcctagcagtcaggagaagtacatgaagagcaaggagaagaaggaacagcagaagacagctgagaagaaggacgatgagccagcaagtaagaagaggaagttctcgcttactaacacagtcctggagaagcagaagatggagttgggcacgtttttccgcatggaagaggaaccaatcaacatcaagctatacgaactagaggaaggcaaggaacaccacgtacacgaagctattcgtattgacagtagtaactctaagtttgctaagaagaaagacgaacagggtaatgttttggatgatttcaaggtaattgtgtgtgatggagagaataacttgtatggtttctttgcaaatacacaattaaataagttgtttaacaaatggcacacaaccgaaaagtatagtatgaaaccagaacacaatatatctttgaaggtttcacagatttcagaggttaggaatggaaagatgtgtgttgtaaagatgggtattaacgatgatgtaaaatgttttgccaggtaatgaagttgaagagagaagggatggtggatcataaccctcttgttacattttactctggtataattgtaaagtttgaacattggaacaatgtcagtaaagtaagaaagtttgtgtataagtttgcacagtggttgtataaggaatgtacatacatccacaacataagtgctgcagttcatgacagatgtaaagatgattgttgtaaagactcagccaataaagtatgtaagaacatatatggtcctcatttacacattttattggagagtgtgaacgaaaactggagtaaaagtagcaagagggttttattccgaggctacgagaagatcctgcaacacgacaacaagcaactatggcaagacttgggactacagaagacatcaccttcgtcgatgagtctgtgggacggtgagatgttcaagtggtatatgttcagggataggaagtatgcaaaggtacatggaacatactattacagtagtaacgaggagttcctgaagaagttgatagacatgaaggacacacaggagagagatgatttgtatgagaaggcatgtcagtttaagagagataagaatgcagcaagaaagattgagaacagtactgctaagacattagaggacggtgagaacgaaaacataaggttgagcagttctagggccatatatcttgaaaatttacaagtgttggagaagtacttaaggaaacacaaatgttacactattcaggactttaagatgatgcaaaggaatgatgatgaaatttgggttaattacatgtatgaaatccagaacttagaaaaggtgattgagaagttaaacattatggagtatagtttacaacaggcagactacattgagggaaacccatggataggagaagacctatggaacactaacagtgcatacatgaggactgtcaagaggggtaccgatagatactattggtacatacagagacacatttccaacagggcaagtttgataggacagaccaaacagatttgtattgacggggcatatatgatgtttaagatcatagagaacatgagggtagagtcaagaccaaagacgataccgataatcagtaagaacaagacagtacagtggatacaggactttatggatatcatgcatgggaatttgcccaagattaactgtatgatgttatacggtaatagtaacagcggaaagacacagttaattgaggctttaactggtctagtaaacacagctgtaatgacaaatgtaggtgatggtggaacattccacttcagtaacataacagagatgagtaccattgtagtagggaacgagacaaagatcagaactcagacaattgaacaatggaaaggattatgtggaggagagaatgtaacaatgcctatgaagtataaagaacacaagacacatatgttcaggaagcctgtgtttctgactaaccaacatcatccgctggtagagatatcaaactatgatgacaggaaggccatagagaatagatgtttcatgtataaggttgaattaggaagcgaggcagtaaatgcacatataaagtttcctaacagaatgattccgatcaggaagaacccagaactaactcagtttatactagcatgtatgcagtatgtacacttgaactatatggacagggcagataagaagtttaagattgggtttttcaacaagctttatgacatgctgtttgaggacagctaaaaatatgtacgagaacgtttgactttcccgggcaacaataaagtgataagataagaccgtgagtttgaatatccacgttatacgcataagtagtacaccatgagtctatcatgggagcagtcgtgtcggcagtagctgcagtcatagctgtggtaactgaagtagtggaattcatagtcgatgtcgtggaagtggcttttatggtggcagaggctgtacaggtcgttgcagacacagtcaattactttactggcggcgatagtgctgcgaagaacgatcagagcaatccggagacgcagggagctaatgaggtcagcggtacagcagaatcgacaaacgtaggaggaactcagggatatatgtggggacctggagatctggacgattacatagatagagccacagacatagactaatgtcacctacaagaagaggagggaattattttgcaagtaagcattttcaaagcaagcgaaagaataaactagcgaaggtgaaagacttattggcaagtaagaaaagagaaaggagattcaagggaaaaggaaatactctaagtgagaaaccaagtacatcggagtggaacgatcctgtaagacaaagatttccagcattagagcaagaagagagaaacacatttgcaggattactagcaatagaagcagcaccagaccaaagacagttaggacgtgataataacaatcaattagcgctagtacagagagatacaagagtagcagtaagacaaagtacaagcagaggagaagcattagaagtagtaagagcagcaaacgaagcaataagaagtggtggagacagattagcagaattagtaagaacatacgcatcaggattttcagacagtacagaaatagtagaagtaagacaagaagatagagtacagagagatatattccaggaagaaggacaaaatctattggctattgagatcgcattacaagagccaagcagtgtagcactacaattggaccaagagagaactccagcagtaaagagagctttagaactaacacaagaagaagaacaattagaacgcatagaaaacgctaagaaatacatagaagaagttatagaagaaactaatcaagagttagaaaatcaagagagacaagaggtaagtgcggcggaggcagatacgatgaacactgaagcacctgtcccgatggaaacttctgaatcaggagctaccgccgcgccgcagcagcgagctgcagcgggcggtggcggtagtggaggtggaggcgaatcagcagggtacgggagaaactctagcgattcattccagcgccaccgcaacaaacctatcgatctcaaacacattggtgacaatgtgtatgtagctcagagggtttacaaggtagaggctgagtgtaagctagtgggcgacaagttatcatggtcgccatccacatcaaacaccaagtttatacggagactgttgggaataaacggcaacagtaacacaggagatatcaagcacgggttttcggcgtcactacctggaagtattggactgggaaatctagcattgggtaactacataaactcatggggcatggacaacatatcgaagagcgaggacagctgggctatcatcgccacaaggggtaagatgaaccacttgcaggcatttgagatggtgccacagtaccaaggagagaccatagtgggatatacaagtgcgccattacagtttggcaaacttttgggacacgtatactatccagatcccgagggtgaggagaggataaagatttcaagcaaagctgatggccaagaagctaagatgttcaaagacgcaatgtcaaggtatatgttagatgatgacatgaaccagacaaagatcacagcagaacataaccaagtatttgcattcacagacttgagagattcaccaatgattagtgaaatagcagcataccagacaactgacgaaccccctaaaataaacggtataggaatagaataccagggattcaacctaacattggacaccaatgcagctcttattggactcatgccaagtaactgtataagcaagaggaaggaaatacagtcaggtatggataatgtagtactctggtctatgaagagtaacagactcatagacaaaagattctggaaaccagacggatggactaagaagagcacgaacggtatggctagagacaagatagacactccaccagcaaattatgatatataccaagaagctcacgtaacaagaacagcagagtatgcagaatgggccaggacagaaatattctacgatgcaggaacatcatatggaagtgttggaccaagtgacaatggatatttcatacagaaatacaacttatggggacagtatgctacaagcatatttttcatgccatatgttcacacacggagaggtataatacaagacataatcataaactttgatctaacactccagatcatggtcaagaggattccaaggcatgtatacaatgatttctaccacataaacacaagagccatgcatccagttaagtatgacagtgcaatagacagaacattcggatacgacgagatatatgcaagatccatcaacatacatgaacacatgagtggaactcatggaagtaagtatgcagaaagaggaccgatatcacacatggaagcaacaaagaagaactcagacagcagaaagtatgcacagaggagattaattctagatcaaggtgtatcaagaatgaagacaagaagcagtgcggcggcggaagatgacataccagaagattgtgacgacttcctagaaacttcagaaatggagtcaccgccgcagccgcagttgccaaagaagaagaagaagtacagaactgttatgtaagtttgacatattacaaatgtatataatgggttacaataaaggtttaaaaaatcacgcgtgcgtggtttacccttcaaaaggagcgactctcagggggtaggtagggggatctttgcgatgacactgccagttgcatatatgcaactggcagtgtcatcgcaaagatccccctacctaccccctgagagtcgctccttttgaagggtaaaccacgcacgcgtg

SEQ ID NO: 170 - DNA, 5454 bp, Periplaneta fuliginosa densovirus
  source 1..5454: mol_type = genomic DNA; note = Periplaneta fuliginosa densovirus - NC_000936
ttggccatagcttcgctataccccaccacaaccaccaccaccacgaccggacacatggcctttggccgtgtccatggtgtggtggtggtggttgtggtggggtatagcgaagctatggccaagcaccaaggggaaggggtaaccgaaggtggtgggggaagcgaggatataaaagagcgcgcgcagagcgggagcgtcagtatgggatcagagctgagaccgttgatatcggaggtacaacaggaaaggtttagtacagatacaaatagaatatataacgcaggatatagtgaaatacgggaaccgaactggggactccggaatagaattagtggatggagtgaacgtgtgcgtgagctaacaagaccaaataattatagtgttattgaaggaagtgatatagaattacctataagtgtcgacgacgatgtgcatattcctattgaagaagaaacaagttttagtgtaagtgttccagaagcaacagaaactacaggtttattaggtactagtgtcattagtgctggaacgggtgttgctggaggagctgctactggacttgctgctagtgatattggattgggtgctggtgctgtaattggatctggaatagttggttacttaggccataaaataattagtggattaacatatccttttcatcattatttaggacctggaaatccattagacaataatgagcctgtggatagagatgatgcaatagctgaagaacacgacaaagcatatgcaaatgccaaatcatcaatagatgtaataaacgcagataaaaaagcaatagatcatttttctgaagattttgaaaaaaatggtaatttacattctttgattggaaaaactggattacaaattaaaacagctattgaacaacggtttggagtaatctacccttctgtttcaggtacgtaatacacctccttatgaacgtcctaattgggaatcaatgaatgaaggtcaacgacaatattcatatgaacaatggatgttatcacgtgttcgtgcaggacaaagatttacaccacctcctctttcaggtgacgaacgagatagaagtccaatcagaggaggaggaacagacagcgatacatatccagacgattacataccgcgcacgcctggtagagatattccagaacttcaagaacacagtgatcatagtattgttagagtggaagactcattaccctctacttctcacagaaataacgatcaaattcctgattcaattgatgtggatatggcttctcactcaggtgtaccagatagtgttggcaatcctgccggtactggtaatgatccagaaactaatggtgcaggtggtgaaccaccaaataaaaaagcaaaaacaggaggagcaagtagtaagaaattaccaggaacagcaaagcctcagagtctcgagggaactggagatcgatcaattgtctatcttgaacgacctataaatcctaaaaatattgtcataactacttataagaaacaacacaaattgttgacatttggaattgcttctaaaatattgaatcaaaaaattgctgctgtagacaatgttaatccagctcatgttatatattttcttactactgctttagctgaagttcctgttcataagccagtgttgtatatgaatcaatctgaatatgatttattacctgttggtgctgaagtattgcaagtaaaagtgtctgttgttcaaagaaatgcattattatcatttcagacaaatgcttcatctacatcattggctactttgaatcaaaataagaatggagtatattgtattggtttgaataaaacaggttatggtactaatcgtagatatacagcattcaatgcaactgaaaagatgattcctgaaaaatgtggtccacctgtatatgcagcagtggctgaagggtatgaaggaatgttggaagatctatatggtgtgaataataatgtagcatcatttgtaacatcattaccaaagcatcaggttggaatgtatacaaccttaaagaattatttttgtatgacacaaactagtttgtatactggtggttggccaaatctacaatcaaaagtagttgagtatgatgctgctgctgtagtgggagaacccatcttgacatatgtttatcaacctaaaattgctcctttgaaacctgttcagaaatatctgccaacacaattaccatatagattttcctctgaatatgttcatggtactttgcaatcaggatttgaagtaatgaccaagaataataccgatacaactaaggatgtaagttattcatcttctaatccgagagcaaacatagatatgtcatttgatatctatactgatattgagaaatcacaatgtatggttcgtggtattggtggtaatatgactccacaaatacaaccttcattgcatattggtattaatcctgtgcctgccttgaccactgctgcaattactggtggagatactaattcatcatttactgataccagatcatattttgatgttacttgtgaatgtgttgtaggatacagaacatatactgacagaccatttgcctcagaatataattgtgctgctggagaggaaataagaggacataatgggaaatcactaccttttgacagtaatactgttccatttgctggattgtatgttaatgcttccttgtcagagcaataaaacaacagtaacatgaatgaatttatattttattgttcaattatccttggaattatttcccaatacaccaatatttcaaaagctacaagcggattaggtttcttattatactcagctaggaatggagcttgtttccatctatataccttcactctatctacaaatgctagttcatgcatgaatccaatcatattatttgtaagtacaataagtggtgtcttatatacatgacaatcttttttttgttttactcttacacatagagcatcaccacctgttaacattttcaaagtgtctgtatatgcatcctcatagtttggttcattccacaaaagcacacgtttagatgttgcttcttgtaaactgaaattattagtcttattcattatacctaattgtccatagttcattagataatgtagatacacatcaaaaaagaagttctttcctgcacttggaggagaccatacacatattgtattacactttggtaatttacgctcaagcacattataaaatgtatttaaaaatgatttaatctgaacaacgtcatcatcaaactgatatgctaatagcttatttaaaattgtcaatgaatcattaacagaatagtatttatcttctaatggttgataaccagccataaatgttggattacaatatggttgtgaataaaaagtattaaagtcatgcaaagtccaataacacatttcctcacttttagcatcaagaaaggatttcacagtttcattatctgcacgtaagtatcgtaagtctttatgagttaaccattgtcttgtagatataattcctgctaatggacacacgggattttcattcactattttctccatttcttcgcggatgtcacttgcacgtcgtcttctccttctgccatctctactattaattcttgcactttttccagtaacttcttcaatggatgattctccgcataattcacttgagcccgtagaagtgcatgttcccaatatttgtccggagtcttgtccttgatgtcctcgctcctgtaaagcttgatatccatacggtaatccgaccacggaccctcccactttagcgaactgaagccaccgtccgttggaaatgaaatagaggatgatatcgtcccactgatctgatgcgattgagctaatcgctttacgttttctaatcgctccgcgacgcttagctttaactgtctcttctttgaggattttgcatctacagctgccatcggaatacgcgcagtcatggacgacgtggacatgatcgtcgtgggttgatataaggcacaaatttcctgggtaatctctagctgttctaataacttgtctagcgattctattagcttctcttgagtcgtcgcaggccaagacgtcgctaaggtaccggcgaaaaggtccgaaaggcgttcttttaattcttgatacgatgtcacgttgaagttgttgctgcgggcccaatatctcaccatcggaagaaacgctgttttccactcctcttgagaagaatcctccaaatccgtctctagcagtctcatccaaaaacccggcatcgtcacgcattcgttgccataccgttcccatagtgtcatccaaagctgggacatagttactgttgtctggctgctttccatcttgcatctatatcaaataaagttttaaacacttcatcagtaactgtattcccatttactgtttgtacaatacataaatctgtattatcatcagaatcatcagaatctgattcccatagattggtattatagtatttaaattcttcattatatttgcgtctgcattctgaataatccaatatataacataatggttcgataatgcaatgatcacaccaatttttaggttcccatattatttcttgtaatacattttctgcatcaacaactgtatgatttttatataatgtataatatactccttgtagtttccatagatttgctgaatatggtttataataatcagaaatggtaaagaaacattgtttacacaatcgtgattttatgcgtgtattcatgtttgtttgaatatagtattcgtgatggatatggcatgttatgtcacagaaatttggtacttcaaatggatgattcatgagtgctataaaacattctacagtcattggtctatttcttgttatatgatatggtgattgtagatctattatgtctgttatttgagattcttcatcactacttaatggcattatctcgtcacaatgtaaccaatcttttaagagatctttttgaattgtttgtggtaagcatgttacttcaccccaattacttcgatatgtttctcttgttttcaatttacacatatcatataaactaggtgcattatatactttatcttttctggaatatgtatgcaacatgcgattccattgatctgttcgcatacgttttatattatgttgcatgcttaccagctttgtacacccctgatgcttttgatgatcctttgtacacccctgatgctctcgatgatgtcttgtacacccctggtgttggttgatgtgcacttgttgatgttattctgtcgactgacgctcccgctctgcgcgcgctcttttatatcctcgcttcccccaccaccttcggttaccccttccccttggtgcttggccatagcttcgctataccccaccacaaccaccaccaccacgaccggacacatggcctttggccgtgtccatggtgtggtggtggtggttgtggtggggtatagcgaagctatggccaa

SEQ ID NO: 171 - DNA, 5380 bp, Planococcus citri densovirus
  source 1..5380: mol_type = genomic DNA; note = Planococcus citri densovirus - NC_004289
ggtacctatacgcgagtggtcgttgacgttgtggttgttttacgaagtaaaatatatagctatcaagtacagttctacttttgcattgacgtcataagtcacgtgattttgtattataaatagtataaatactccttcttttaatttagttcttcataatgtctgatcaagtagtgccggacgtacctacgtttaccgcgttagctagtgttaaaggaggttcgaaagacgctttttggcaaagtaatcagaattggaaaaaagaattagaatcgcgcgagggtcatccacacggacacccgttgaatccaaaagacggtttttggaattggtatcgtaaatatcaatttgtgaataatttaaacgataaaggacaacctcgtgtatcgaagaaaccgcgtatttcaaagaaaaaagctgaggttagtggttataaatattttgacgcttggcgtaaagaaaatcgtgaaaaattagacgaagtatataaacaatatttagaaaaatttcctaagcgacctaatcgcagtaatccaacattacataaattatcgaaaagtgtgccgtatactagtggtattgaacgtgttgccgatctcgtttcaggcgacagtccaggtacagttctcctcggccacgattatattggaccaggcaatccgatctacagaggagacgataaggaacttacgtctactgaccgaattgctaaagaacacgacgtacagtacggtctcatctccgaatacgctcaaacaaaagaagaagtacgtgcgctcaccgataaagcggatacagaaggaattaataaattttggaacgacagtcgaattggagaacaaatcttctcgggaaacatccccgattttggatcactttttggcgcagccggactcttaggtaaacggacatttgaacgtacctttggacaacagtatccatctcctgatattaaaagtaagttttatttatttacagatggcacctaagcgtatcccacctttgaaagcacctcctaacgaaagacctaattgggaaaggttaaacgaaggacaaagacgatacgcttgggaacaatataatttggcgcgagttcgtagaggtgaaaaatttacatctcctgttatttcagaacaacaatctgctcccactgctcctatcgaacatccggttaataacgcagacgatagtgacgacgaagtaggtgggcctatagaagtacaagccgaagtacacgaacatccgcccgatatcgaatccgaagacgaaggtttagagtatttagacgatttcgatttcgatttacaaaacgaattaatggctcaagtacccggtactggaacagctatggaagttggtagtactactggtaatgctagttctgcgaaacgtaaagcagaaagtgcaggtggaattggaaagaaacgacctggcacaggtcatgatacagaagattccggagctagtatatcaggtgatacaggtataatgatgggtcctatacaacgaccgattgttaatcgcgatggtgattctgatatccgtgtttatcgaaaggtacatcgatttacaacttttggacttgcttataaacctattcaaatttcacgtggcttagaatcgaatacttggactgacgtatttatgactacacctttagctgaaataccgtggaatcgattatttatgtatatgaatcctagcgaatattcattacttccttctggttcatctgttattgatttacatattaaaattcgacaaagaaatgtacgtgttgcttttcaaaccaatagtaccacttctgaattagctactttaaatcaaaacaaaaacgctatatttgccgatggtttattacaatatgccggaggtgaaaacgtagctcctactgcatttgctgctaatcaagcaatgatacctactgcaattactaccgaattaacaaattcagcgtacaatcaatttgtagatcaattttacggagttcaaaacacaaacgccggttttcttactggttctccgcgtcatcaatttggtattccttatatattaccgttttattacgcgatgcaaaattctgttaacgattcatcgttatctggttggccttgtttacaagaatattatcacgaatttaatgcggacgaaacttcaaatactgttttcttagaacgtcattataaacctaaaatgggtcttataaccactccaatcgacgctattatcaacgcttatccacagtacggtgcctctactggtactgtacaaattgcgaaaggtactggcttatctaacgcaaatacacttaccaactattcgaatgttcttggagcacctacccagctggctttacgagacgacgatacttcgaccaatgctttcgaaaacgccgcacgtgatacttacttttcgagtttaacttttccatatcaaattaatcaaattatcgaaaaagatcaaatttttactactggtttacgtcatgaaagtaataattctgcttctcaaccatctcttcatattggaattcaacccgtacccgctctcacaacaacaagtataccttctacttctattgataatcagtttactgatactcaatgttattgggaagttatttgtacagcaaaagttaaagttatgtatcccacacgtagaccgttggcaactgttgctaatgtttcgtctcatcaattattttggcgtatgtgcgatgatactggcgttgagtatgatttacttccacaatatacaatgcgagatggtttatacgtaaccaaagctacaactcctcctggtagtgttgctcgagcatctgtacctccagtacttcaacgtaataaataagaacattgtaaatattaataagaaacattatatttatcgaataaatcatacatagctaatggatatggttttttattactagcggctaataatggtgcagtattccaacgaatagtttttaaacgtacatctttaaagtgcggatcccaacatatatctaattcattattactgattaaaagaacaggcgtcttagtaaatatacaatcagctttaaatttaacacgaacgttaaaagcggttccttcgcataattttttaaaatcttctttcgctccttcttccatactaatttcattaccaacaactatacgtcgattaactacgtcttgcaatgcaaaattatttgttttattattaactcgacctatatgacctacattatttgctaaagcgataattgcgtcgaaaaaataatttttcccagaattcggcggaccaataacacacaatgcattcatttttggattaccgtcaagaccttctctgttaaaccaattacgtagattagataaaaatggtttaataatttcctcttcacctttaagttgaaacttcaataattcgtctaaaaaatataagctagtatctctagaatgataatattcatacggatctaaattattagcataaaatataggattatctgcttgcgaataaagttcatggaattctttaaaagaatatttgtttaaatgtaaagcgtgaatatcgcacgctgatatataattatctttattacgtggatcaaaaagtatagtacgaaaatccgcgtgatttggcggtattaaatttttaatacctattaacggtaccggacaatatttaactaatagggacgatacctcttcgacgactttttcaaagttgctccgctttcgtttagatgctggttcacttcgtcgatcaactgtttggccaacccagctattaccgagttctgagacatcgtgtataggcagtcggtttctttgaaattccaatactgattgctcccatccgagcacattttcttgccattgtataaccggagttgaagaattagatccttgcaggtttttgttgagccatatttgtccagggctagtccctttgtgcaccgcgaagtatagcaatatattgatccagtcgagggctccgagttcgtggacgcgcttcctggaacgcaaaggctttcgaagaaatcggtagatactggcgtcgttaaagaaggggcatctgcaggtacttcctgcataggagcagtcgtgaaccacgtgagtatggcttccttcgaaacgccagataaaaaactctcctcgagtacaatggtctcgggcggcattagcaagaacttggcgtactcgaatagcgtgttcaggagattggatggaaatgacgtctgataagtagcgccgagaagaacgctcgttctttgatagtataattcgaacgagatcatctgtgattcgattaaatccttctgccatggttttaaaatcttccggatacaaatcgtgaatcgttcgaagtcggaggggtttattgtctccgggtctattaattcggatatcttcagtatcaaggttacccaatgtcgaaccgacgacatcggtacttgcggatttaggttccatacttgttgaagccacgttttcagattctccatcatctgtaattacaaagaatcgtaaggtactgaccaatgattggctacatcgatataatgcgaaccggaacattcgttcaatgaatataaagtagaaacaaaacaattgttacaataattgtccatatcaacaacttcattaatcgcgtaatcattatataaagtttgaataccatatgcttttgctacgttaccacgaaatttaaacgcgtcgcagatttcttttatacacgatcggcaatacatacgatgaaaatttcctactggtgtatcggtaggcgagttaaaaaaatagtattttgcatactcaatttcgtaatattcatttcgtaaaatgccaaaattatatatatcagaatgattaataaattgaaaacagtatgcaggcatattagaatgacgagtataaaaaggaaagtcatccaattcggataaagctccttctgatatttcatcgactccgtaatcaaactcaggctgataatcataatatttacgaggatcccgaaaacgatacacatattccgacaccaatggtacgagcgttttaggtaaaccaagaaaatacgcatcactaactttagataaagtattaccaatagcgcgaactgaatttaattttaaactttgagtataatcctctatctcaggaaaaaacatacctactacactagaagaactacgacgctcgaataaactgttgaaccgattgatgaacgacattaagcacaactaattccaaaagaactaatctcactcgtatttataatacaaaatcacgtgacttatgacgtcaatgcaaaagtagaactgtacttgatagctatatattttacttcgtaaaacaaccacaacgtcaacgaccactcgcgtataggtacc

SEQ ID NO: 172 - DNA, 5050 bp, Sea star-associated densovirus
  source 1..5050: mol_type = genomic DNA; note = Sea star-associated densovirus - NC_038532
ttattaaagggtgggttttggcggcgcgcattcattatgtcgggtgaagtctttgcgcgtatacgtgagggtttacgattgagaaatcctataagttatcgtcggttattgcgtcttcaacaatctggtggtcgtgctggttttattcgtgttggcgagaatttatatcttgctggtgacgaaggctccatcactaattttgtggatccgaatgaagttgaatcttacgaagacgtaatctacgaaaatcaaggcgttgcacaagagagtatcgaacaaatacagttggatgaaattgaaattaatgatagttcaccattattagaagaattttctgctactcctggtcttgctgaagctggaggctttgctggtgctggtagtgttgctgctgctccttctgctgcgaccgttattacatcagttggaattactgctggtattattactatcggaactggagttacacttctttcatctgacactgatactgttgatcacgaagatcctgtggtgagtttacctgatcatagatatattggtcctggtaatactattgacgatactgaacctgttgatcttgatgacgatatagcaagagagcacgatattaattacgaaaaagctaaaactcaagaagacgtgcaagaagctgatagagaaggggctggtgaatttcttactgacgttattcataattcaaatcctcattctattgctggttatattggacttaaagccaaggaaaaagttgaaagtgtcatcggtgtacaatatcctgctaatcttcccatctcttcctcaggtatggccactcatcatgtctctagacgtgctttagggaaatatgatatagatcgcgatccatctcgtcatcctgattttcctcaaagtcatggccaacagcaatatgcttgggctcagtggaatagggctcgtcagcgtcataatttgcctagagtagatccacctcctaggtttggttggaatgtcactcaaagacctcgaattgagggtactgggcctggtcgtatgagacctagctctaatagtatttcatttagagactggaaaaacgggagacgcggtgcatccggtcctttgattgatgggtttaatagacaaagagagcaacaaaacgctcgtaatgatcatttgttaaatactgttgttgcatcagaattatctgagtctgaacgtatggaagtcgatgagttatttcgccaagctacaggtggttctatctctcttgcagattttgacaatactgacggtgctggcccttcttcctccaatactatggatacaagaagtaataaacgtgctcatgaaggaccccaaggcggctctgttgcgcctgctaatcctgctgcggccgcttcaattgcccctgcggcaggagctggccataattcacaaagtgatggcggttttgactcggcccaaggtccggtgactgttctacccaaaggtggatactctgcgactggcggaaccatgatgttcaagaaagttcatcgtatgaaatcttatgctataccttattggaatcttgctgatgaaacagcttttagtggagctaatctttgtaccactcctttagctaaaataccttgggaaaaagcacctttctatacttctcctgaagagtttgcattaattcctgctggtagttacataaagtctgtatctattgatgtcatgcaaactgttgccacaactggctatcccactggtggtacaacatctagcgttgccactactaatcatcctaaagtaatttgtattggtaaagatcttgaacgtaaaatgagaggtggagttgacagaactcttactattgctgacactatgattcctactgcagctgatgatcctgctgatgctcttgatgatttcattgctaaacaatatggtactgatcaatctgttgctgatacagctgttgtcattcctggctgtgctcacaaaattccttactataacagaactcatttctgtatttatcagcccaacaaggctcaagctacagcacgtggctttactgcagccaatgctcctggttatgaatatttccagaattgcatcactgaaatgaactctaatgatagcacttgggatcatgttgactctatgcactacaactttgttaatgctcctattggtgaacaataccaacaacttgaaattcaaactgacgattttcgtcaggctactggaaatgctagatattacaatgctagccgtaatgtcaataatattgatcctaatgaagagattaaaatcactgagtcttaccttccctcttcaagggctactgttcctgttgtgacttacaagtcttctcctatggaacaaggatgccactttgttcgtggtgattctgctggtaagcctgctaggcaaccttcgtaccatattggtatgcgtgctattgacaaacaatctccaagtgctacttcatctagagctgctgattttgttcaggctaatattgaatttgaaattactgctaccatgattgttcagttaccaagttatcctaatcgtttcgtgaaacctaagttttacaacacttctttggagaatgctgttcaaggtattggcctctatcctgaatatggagacaaggttgttactttcaacttgcttcgtagcgttgctactgctccaactagaaatgctgttgatcaaactgagaataacgaacctactgaggataacatggtgcctgttgtggccaatgttactagacctaggcgatctttgcctcgtattgtagctcttaagaaaaaagccaagtaaaggataataaataaactttgaactgccattcattttattgttttattcaaccaaaccaaacttcttaaagaaatgatatactgcaagcggattaggtttcttatcataattcttcaaaaatggtgcactcatccaattgaagacacgaacccgatccttaaaagcaggatgtgtcatgaacgagacaacattgttggttagaactatcataggagtcctataaacaggagtgtcatgcatatatttgacattcactgaagtagagtcaccaccaaggagttccttaatgggctctaaaaactctgggctatagttgggttcattccacaacactattcgacggccctcggcgtcttgaaatggaaaagcattatacttattcgcattagacaaatgtccacagttgatatagtaatccttaatagcatcaaaaaagaaattcttgcccgctgaaggcggagagtaaatacaaatacaattaagtttaggaatcttacgttctaacacattatatagcgtgtttacaaaatctaaagtagcatcttcatcagagccacactgatactgaactaacttatccattacttcaacactattctctatattataataatagttctcaaattgaccgtaccctgcactaaagataggcacacaagcttcattgttatacattgattgataatcagacatagaaaaagtagtcaagttatcgctaaacgaatttacagcagttttaatctctttatgagtcatatctttaaacctcaaatcaggatcattacgccaaaccctatgtttaataatagcttcgggaggacaaataggattaagctgcaacatttctactactcgaatttgtattctttcttgcgctcccagcttgcgtttttttcgtcgaggtactgaacatgatggcccctgatctggctcatcatcgtcgatattgggctcccactgttgtagttcagctccagttcctggtatttgtatttccatttctctgaagacttcgggcagtccatcaagtccgctctccgataaattgtaaccctcgcttggaattctttccatttctcctcgtattttctgatatactgttgtccgtcctttcgtgcaataatagaagagtaggttttgaatgtcggtgatggttctacttctacaggaatctcgtcgatgtgcacgtctatctcgtctactgtcggctccataagttttcgcctttttccaccagtcgcacctgcacgacccgttgctgtaaatgcagtcgtggacgacatggatgtgtgtatcttctcgacatacctggagcaatcctcttcggtaatttccatctctctgtaggcatttaagaaagtctttacactctccagggttttcaaatcgtagtacgtctcgaataagttgcccatcagacctttgcagctctccaaatactctatcacacctctttttgaagcctttccaatattgaagctccacgtcttggctaccttttgaaagccacgaagggagttctctagttctggcagtaggttgtcctccgcttccagcatgttcacaaatcccaacaggtaacccggatgatcctcgcttaatggaagttgactctgtagaattttgtgtagaattgttgcaaactttatcgtcttctcctcgctcactactaatgttgtctcctcctcgctctcctccgatcccgacatctctgattccttccttttcgacattactcatcaatggctggcaatgattcggtatctgaatcaaaatccaatcttcggcacactttcttcttaggtggttcctgaacaaaaggtaaaacaactccaattactttatgtgcaaacaatgtataataagtattctctgtttcatcatcagtagttccactttgcaaaatataattacaactaggccaaatatcttccgatggaatttcccaagctttacccgaatagtgctcaatgcagtcaaacatgtacttttcacaatagcgacagaaaaacatcgtagggtgttccaacatcaaatcaataaaatcctttacgttctttgcttcaacagtcagcattcctttagtaaatcctccagcagtaaatccagggtctgcactattaacacaacttatgtgatataaattatgttcatttctagatctattaaatcttgtaatcacacctttccgcatcttaataggaatatcttgaggataatgaacaaaatcatacccccattgatt

SEQ ID NO: 173 - DNA, 5280 bp, Solenopsis invicta densovirus
  source 1..5280: mol_type = genomic DNA; note = Solenopsis invicta densovirus - NC_022748
cccacttcctaaccgagaggagatagaggctcctcgaggttaggtagagggggtcgactagtgccccatctacgcctgaccttaaacatgctgggtacttgctcctaactaactaaaagttagttaggagcaagtacccagcatgtttaaggtcaggcgtagatggcgcactagtcgaccccctctacctaacctcgaggagcctctatctcctctcggttaggaagtgggggtagtgtgttcattgataatgataacgatttgcgcacggcacttaagtgattagatttgtaccgatattgcactataaaatacacgtgccagtattaggagaacattagtacgaaagagcatcaacagtgacaggtatggcatactcaccattatctttacaaactcttgctagacaagtcgtaaataagactattcctcgttggagaaatatattttcactagatataccaaaaactttaaaagaattatgtgcaaataattatttagaagacaagatatatgaaagatcattaatattagatgatgttcgtgatttattaaatagatatacattcgatagaccgtatatatttgtatgtgcagatttatatattgcaataatgaactggaatatcgatgaaataccagaatttgcacatgaagtaaacgatattacatattgttggtacgaacctgcagattatgatatatttgatcccgacattccgaaatattgtcgtgaatgtatggaaatgtcagatgactatttagtgaaacattatatgtgggatagagtttctggatacgacttaattcgagatgtatttcataagaaaaatgcatggtgttctaagtgtcacactgtgacattatttaaaattgcagaaagtccatatcctggtgctcgacgtactttattggagtgtctcgaaaattcctccgattcagaataatgacggagctagcagtagctcctcttcagcgattgtatctacaactgaaagagaaaaatttacaatggagcccgaagaacctggagaatctgtggttcggtgtgaacactttaatggaggatcggaatttgacaacgcactccgattacgatacattaaaaggcatttaccagaagattataacaaactggaaattttacgacaaggagtggtcggcagatacgtacgagaaattactcgacaagctttcggtaacactcgcaaatacgctagcgacgtgtatctcacaagagatgaagaacagcgtgcaagaatgcttcgacgactttctgaattctcagtcagttatcctggaaaagtgctcatctgggtcgatgaaggagaccacatccacatcgtccatgattgtccccactctaatggacagtgcaggtgccacttcaagcgaaccgaagactttcgacgagatcttcgaacgccaatgcgaagatacaggtatatcaccgaaatggatgaactcgactggacgaacgttatcctatacttcgttatgcaaaaacgggaaagcaattcacaagtttggattggaggaagattacaaagatctccggatagtaatgaaagtttacgatgggaggatttgcaaagagaatcccgatcgatattggctcgggaaaatcaaggaaatggacgtgacttgcaactcgaagagcgatacagcgaagacagtagagggtctattcattcgggaacatcgtcgtctcggcaaaagaggagctacgatgaagacgatcgaggaaagagggaactaccaaagaaaagatccaaatttgagcggatatcgtcggcggtacataccttattaaataagtattttgttttaccaagtaatcatattagagatataatgttaggcgatagtcaatataactttctttttgatccaagtaatgataaagcttatatggcaagttgtgaaatattccagaaaaagtttataccattaaagttgaaagatttaagagacatctttgaaggttccacgccagtattctacgcaaataatattgatccaaatttatattaccatgatcgtgaaactagttttaaattcgtagatgatttattacgttttcaatataacgatagtgaagaaaatattgtagaattattaactaacgttagagattggtttaacttagacggatggaataagaatcctaaaatgaatgccttgtgtgttatagggccaccgaacagtggtaaaaactatttctgggatatgttttgctctgtcgcatacaatgtgggccacattgggcgggttaataataagacaaatcaatttgcccttcaagaatgttacggtcgacgccttgtcgttggtaacgaagtaagcatggaagacggtgcaaaagaagattttaaaaagttgtgtgaaggcacggcattcaatattagagttaaatatcaaggcgataaaatatttactaaagcacctgttcttctgataagtaactttgaactagatatatgttatgatacacattttaaaaatgtacgtctacacactattcgctgggtgaaatgtccgcttttaaaggatagtaataagaaaccatatccattatgtatatttgatttattcaataaatacaatattgaactttatccttgtcttaataatccatcccacatacttacaaacggattaatcttatgatcgcgatgataccacaagttgtctttaaacgtagcatgttccccattaaacagaggatgaggagctgtatagttagtattaatttcaatttcacaatacatttcccaccatccttgtacgtcagtaaaactagaattagaagttccgcctaatgcttttgtatctaaggctggaactggttgtacagctacatgtaatgacggttgagtacagcaatgtttcgcgccattataaccatgacgtaaaatttgactcttttcaataagttgttctaaattgaattctcctggagtatcaatacgtaaatctgtagttcgaccagtgtcttcttttatttcagttgcttgattatttgcatcgacagtaacattacttattttattagtaaatgtcattccttgacgaggtacatgagctgttgtaactaatgcaggatactgcaaattaatttgaggtttttgtaattttattagacccatagttggtttataatgttgcttacatatagctcgtccagatacaccatcggcatcaaaatcacgataaaaatgttgaaaacatggataaccaggttcaggatcttgcttaggataaggtatcatacagtaagtaggtaatggagttggaattcccatttgatgtctaggaacagttggaggagctaatgcccattcctttccgtataaatctttatttaagtcttgatgcttgacgagtgtatctatttcccaatcttgtggtatcattgactgtccgtctaaaaatttagtatattgcacattaacacaatttaaattttgacgtaaacctacagcataactaacatctttattttgatttaatgtagctaagtcggtacttgtgctgtttgtcggaaacgcaacacggacattacgcggtttaatagtaatggacacgctagtaacataagactccaaaggcaaagttgcatactcagaattagtaagatataaatataaacggtcccatggtacttgtgcaaaaggcgttgaaatatgacgataactacgatcgccagtttcttcaggtaatatttggtaagatatcccccaagtaataaacttatgaaacttagaataatatcgtacataattatttaatcgcaaagttggtctcggcaatgcaagggaacgtggagcttcggaaccaaacccgttgtctgcttgttcttcggcaccggtcccgggaagtgaaaatccgtcgtcggcacgtccaccttcagcgattccgctatctgaagttttttgtcgtttgatgccttttccgcctttattggaagtcccactggtagacgctccactggtactcttatccatagaaaccggcggagccatatcgttctcaaacgaatccggaacaatggtatctgtatcggaagcgtcgtcagctgtttcgtattgatctccttctgatgcagtatcgtattgggactgctgactgttctgcgagacctgtggtaactcctcagcctcggactcagactctgaaacgtcgggacgatcatgatcaatatcaagaccgcgacgaacaagtgccaatttgtattgctcgtaagcgtatctacgttgcccttcatttaacttatgccaattaggtctatcttcaggttttatatttttccaaaccatctaaaaaaatacttacgattaggatatgatggatataatactccggttttttcttcaatatagttcttgaaatttaatccgtacttgccaatgaatgcctgccaagatccagattctttccactctttatcgaataaatcggcgtgttttttgtcagtatgatttataccatataaaaattctttttttgtaataactccacgacgtgctgcttcaagtaattctgcgtacgttatgtcatgaaattttccgatttgatctgccgcagatcgaggtgcgtctattccaattttatttcccgggccgatataatctgaccctggtaatgtcactccacctaatctcttgtttgtaagtgcttcgatgccaccgcccagtaacgcacctactgccgcacctgtacctccagtgataacaggatcgatacctttaggtgtggtattaaaagttttgctccattgacttcgagtagtaggtgtggatttatttactgctacacgattcacttgattaagttgtgtaccaatgggtgtgtaacgtacatttggtcgatttctacgacgtactcctgtaccactactaaatatacgatctactattttatttaaaccacgccctgatccacgtccgctccgttcgacacgtgatatcgcactacctggttgattcatgactgttgctatgcactacccccacttcctaaccgagaggagatagaggctcctcgaggttaggtagagggggtcgactagtgcgccatctacgcctgaccttaaacatgctgggtacttgctcctaactaacttttagttagttagcgacgactacaaacaccctacgacacaatggccgcagcccgtgtcgtacttccgatccatggcctacggccggatcagggaagtacgacacgggctgcggccattgtgtcgtagggtgtttgtagtcgtcgctaactaactaa

SEQ ID NO: 174 - DNA, 3776 bp, Aedes aegypti densovirus 2
  source 1..3776: mol_type = genomic DNA; note = Aedes aegypti densovirus 2 - NC_012636
tataagtccatattccatataagaaatattatttcgtgatacggatactgtaagatacagtttctattagaaacgatgtattacatctgtatcttacagtatccgtatcacgaaataatattttttatatggattatggacttatatcaaattcctatatggatcactggaggtggaaaataagggaaaaacataaggcggaaattaacttattctccacacacaaatacaaccttaatttccactaccacatggtccacccctatataaggagtacaaaaggagaggcgaatcgagtaatgaattcagtctgttttgaacattcgccgtgtgaacacggaaacctatattgtgagtgcatatattgttgggagcatgacagccagtgcagggggaaaaaactggatttgggagaatcaactggaatcgaaggaagactggccaacgataaccaacaaccagggctctcagatttatattgcaccgagacaatacatcttgcaactacagtaccggaaagaagagtcatcaatcgagaagattacgtcaaggatttcgctggtcaaaccgttggtgacctctacccacaattacaaggcagcaccggagcctctgaaccaattgatttcgcatttccaactgttggctcaggaagctgggaaatacttgtacgtgaatctcacaaacatttcgagccaaataattcggaagaagcttatcaatcacatattagaagtgtacgaagaagattattccccgaagaaactatggataataacgggtcacaagcaagcacgaccgaaatgctacgagacgctgtcgaaagatgcggttttgaaggccctcctaacagcccaagcgaaaataacagagatggaattgatggaacgtgtatatcaaccgtggaattacacagcaattgtattgttaacgcacattgcccaaaacaaggaccaagcaatcaaaccaataagagaaagaaatcaaccgatacaacagaatcaagcggatccaaaaaaaataaaagcagcaataatcaacaaaatattcaagaacaaggcagttccagcatcaccgacgcagtcgatctcgtcgacggagagttggatggatcaactggatcgaatcgagaaacagcatactacacattcgtcctccacaaagacaacgttaaagaggactggagatacatcgccacaacaagggccaagcaagcgccgagtttcatcacattcgatcacggagaccacatccatatcctcttctcctcgtcaaatacaggaggaaacagtaccagagtcagaaccagaatcaccaagtttcttagtgcgacaagcgcaggaagtgcagaagcgactatcactttttccaaagttaaatttctcaggaacttcattctctattgcatccgttacggtatcgaaacagtcaatatctatggaaataaaatccaacaacaattaaccgaagcgatggatacgtttaaaatattatttgaaaatagagacccgaatgacgtaatattagaagccggttgcagactatatcatgaagaaaaaaaggataataaacaaaaaagatgcggacaacgaaaacaacaaaatctaacggacattatattggaaaaaattaaagaaaagaaaattacaacggcacaacaatgggaaaatcaaattgaaccggaattcaaaatacaattaatgaaggagtttggattaaatgtggacagttatgtaacaagaatagtgcgcattgagagaacgcgtatacaacagttgataaaagctaaaacgcttacggaaataatgctagaaacattaaatgatgaatatattaaacacttcacaccaggagaagacaacagcaaaacaacaaagtgtattgaatggatcgaatacttattcaaagaaaacaacataaatataatccacttcttggcatggaatgaaattataaaaacaaaaaggtataaaaaaataaatggaatggtactagaggggatcacaaatgcaggaaaatcactaatattggacaatttattagcaatggtaaaaccagaagaaataccacgagaaagagacaacagtggattccaccttgatcaagtaccaggagcaggatcaatcctatttgaagaaccaatgatcacaccagtaaacgtcggaacatggaaattattactagaaggaaaaaccataaaaacggatgtgaaaaataaagacaaagagccgatagaacgcacaccaacgtggatcactacagcaactccaattacaaataacattgatatgaatgagacgtcacaaatactacaaagaattaaactatatatattcaaaaagagtatccaacacagagaagacaaatatactataaatgcacaaattcaaaataaattgatcagtcgtcctccaactctcattgagccaatacatatggccatagtgtttataaaaaatttcacaaaaatatataatctaatcgcagaagaagacaaagcacacacagtaaacgagaaggcaatacaaatcaacaacgaagtgaaagaagaagcagaatcatggcagacagcacttcaatggaccatgatggagaacaacgaggaacaaaacgaaaacgaggagcaggcgctggaggatcaggcgcaggaatcggaaaaggaaatagtaattccgtaaaagaaggttatggaccaaatatgaccgaaatgatcccaagaaatattatgaacaaaggaaatcatacggtacttcatacagtaaagcagcaaaaatacttggacttcaacttcgtatcgaatcaaaatccatacattataccatatcaaacggcaggattctgggcatcaatgtgggaccaaggagaaatcgaatcaaacaacaccatcaatatcatgaaagcactaaataaagtagctctaggagtaacatggatcaaaggagaaatcacatttgaagtatatgcagtaaccagacaacgcttgctaacgggaacgacaaaccaaactacatgggactttgaaacaagtcaaaacatgttcatcgcagacgcagacagagaaccagaaaatttcggattaacatcagcagcagcaactggtccactcgctcaacaaacaacacaaacactactattcaacaaaaacaacgacagatacacaaaatatgaattaccacaaagaaatcaatatacaagaacaattgacttccaagaactaacaaacaactatatgtggaaaccaacggacatcaacgaagaagcaaactttagaagattgatcccaatgtcggaaggagtatatacaacagcaaacgcaacaagtaaaatgtcagaattaacacaacaaaattcagcatgggcaacatcaggaaaaacaacacaaggaacactattcagaaatagaacatcatatccaagaatgcatgtagcacaaccacaagttccagatgaaaccggatacatgaaattcagataccaagtacgaatgagcacaaaattatacctaatttttcatatgttaccagattatggatcatcaacacaaacggaatatatgcacagacaagtactggaattgccagaagtaactgcaacaaacggagtagtaacatgtatgccgtatgaaatcaaaacttaaatatattattcaacatgtatcagctataacacatatataatcaataaagcattcaaaaaatatacaagtccaattaatatatatcacaatattccaccttaaaatataagcttaatttccacaaccgtattccacctca

SEQ ID NO: 175 - DNA, 4139 bp, Anopheles gambiae densovirus
  source 1..4139: mol_type = genomic DNA; note = Anopheles gambiae densovirus - NC_011317
agtattattccgtgatacggatactgtaagatacagatgtaatacatcgtttctaatagaaactgtatcttacagtatccgtatcacggaataatactttttatatggattatggacttatatcaaattcctatatggatcactggaggtggaaaataagagaaaaacataaggtggaaattaagcttattctccacacacaaatacaaccttaatttccactaccacatggtccacccctatggatcactggaggtggaaaataagaaaaaaacataaggtggaaattaagcttattctccacacacaaatacaaccttaatttccactaccacatggtccacccctatataaggagtacaaaaggagaggcgaattgagtgatgaattcagtctgcgatgaacattcgccgtgtgaacacggaaacttatattgtgagtgcatatactgttgggaacatgacggacagtgcagggggaaaaaactggatttgggagaatcaactggaatcgaaggaagattggccaacgataaccaacaaccagggctctcagattcatattgcaccgagacaatacatcttgcaactgcagttcaaccggaaaggagagtcatcgatcgagaagattacgtcaagaatttcgctggtcaaaccgttggtgacctctacccacaattacaaggcagcaccggagcctctgaaccaattgatttcgcatttccaactgttggctcaggaagctgggaaatacttgtacgtgaatctcacaaacatttcgagccaaataattcggaagaagcttatcaatcacatattagaagtgtacgaagacgattattccccgaagaaactatggataataacgggtcacaggcaagcacgaccgaaatgttacgaaacgctgtcgaaagatgcggttttgaaggccctcctaacagcccaagcgaaaataacagagatggagttgatggaacgtgtatatcaaccgtggaattacacagcaattgtattgttaacgcacattgcccaaaacaaggaccaagcaatcaaaccaataagagaaagaaatcaaccgatacaacagaatcaagcggatccaaaaaaaataaaagcagcaataatcaacaaaatatacaagaacaaggcagttccagcatcaccgacaatatcgatctcgtcgacggagagttggatggatcaattggatcgaatcgagaaacagcatactacacattcgtcctccacaaagacaacgttaaagaggactggagatacatcgccacaaccagggccaagcaagcgccgagtttcatcacattcgatcacggagaccacatccatatcctcttctcctcgtccaatacaggaggaaacagcacaagagtcagaaccagaatcaccaagtttcttagtgcgacaagcgcaggaagtgcagaagcgactatcactttttccaaagttaaatttctcaggaacttcattctctattgcatccgttacggtatcgaaacagtcaatatctatggaaataaaatccaacaacaattaaccgaagcaatggatacatttaaaatattatttgaaaatagagacccaaatgacgtaatattagaagccggatgcaaactatatcatgaagaaaaaaaggataataaacaaaaaagatgcggacaacgtaaacaacaaaatctaacggaaattatattggaaaaaattaaagaaaagaaaataacaacggcacagcaatgggaaaatcaaattgaacctgaattcaaaatacaattaataaaagagtttggattaaatgtagacagttatgtaacaagaatagtacgcatcgagaggacacgtatacaacagttgataaaagcaaaaacgcttacggaaataatgcttgaaacattaaatgatgactatattaaacacttcacaccaggagaagacaacagtaaaacaacaaaatgtattgaatggatagaatatctattcaaagaaaataacattaatataatccacttcttggcatggaatgaaattataaaaacaaaaaggtataaaaaaataaatggaatggtactagagggcatcacaaatgcaggaaaatcactaatattggataacttattggccatggtaaaaccagaagaaataccacgagaacgagacaacagtggattccaccttgaccaagtaccaggagcaggatcgatcctatttgaagaaccaatgatcacaccagtaaacgtcggaacatggaaattattactagaaggaaaaaccataaaaacagatgtgaaaaataaagacaaagagccgatagaacgcacaccaacgtggatcacaacagcaactccaattacaaataacattgatatgaatgagacatcacaaatactacaaagaataaaattatatatattcaaaaaaagtatccaacacagagacgacaaatatactataaatgcgcaaattcaaaataaattgatcagtcgtcctccaactctcattgagccaatacatatggccatagtgtttataaaaaatttcacaaaaatatataatctaatcgcagaagaagacaaggcacacacagtgaatgaaaaggcaatacaaataagcaacgaagtgaaagaagaagcagaattatggcagacagcacttcaatggaccatgatggagaacaacgaggaacaaaacgaaaacgaggcgcagaaggatcaggtgcaggaatcggaaaaggaaatagcaactccgtaaaagaaggatatggaccaaatatgaccgaaatgatcccaagaaatattatgaacaaaggaaatcatacggtacttcatacagtaaagcagcaaaaatacttggacttcaatttcgtatcgaatcaaaacccatacattataccatatcaaacggcaggattctgggcatcaatgtgggaccaaggagaaatcgaatcaaacaacaccatcaatatcatgaaagcactaaatagagtagctcttggagtaacatggatcaaaggagaaatcacattcgaagtatattcagtaaccagacaacgcttgctaacgggaacgacaaaccaaactacatgggactttgaaacaagtcaaaacatgttcatcgcagacgcagacagagaaccagaaaacttcggattaacatcagcagcagcaactggtccacttgctcaacaaacaacacaaacactactattcaacaaaaacaacgacagatacacaaaatatgaattaccacaaagaaatcaatatacaagggaaatcaacttccaaaaactaacaaacaactatatgtggagaccaacggacatcaacgaagaagcaaactttagaagactgatcccaatgtcggaaggagtatatacatcatcaaacgcaaatagtaaagcgtcagaattaacacaacaaaattcagcatgggctacatcaggaaaaacaacacaaggaacactattcagaaatagaacatcatatccaagaatgcatgtagcacaaccacaagttccagatgaaaccggatacatgaagttcagataccaagtacgaatgagcacaaaattatacctagaatttcatctctacccagattatggatcatcaacaaacatggaatatatgcaaagacaagtactggaattaccagaagtcactgcaagaggaggagtagtaacatgtatgccgtatgaaatcaaaacttaaatattttaatcaacatgtatcaactataacacatatataatcaataaagcattcaaaaaagtatacaagtccaagtccaattaatatatatcacaataaaaatccacattaaaatataagcttaatttccacctccgtagtccacctcagaatattggcttaatttccacctccgtagtccacctcagaatattggcttaaattccacctccgatgatacagttaagaagccaacattagtccgggatccccgtgtgagccgataggcgaggatcgaaagcccaaattttgctgacgtcacctcacacacataccaaaagctttagtttctaatagaaacagcgtattacgcttaaagcttttggtatgtgtgtgaggtgacgtcagcaaaatttgggctttcgatcctcgcctatcggct

SEQ ID NO: 176 - DNA, 4176 bp, Aedes albopictus densovirus 2
  source 1..4176: mol_type = genomic DNA; note = Aedes albopictus densovirus 2 - NC_004285
tccatgatatagaaaagaaatattatttcgtgatacggatactccaagatacagttactattagtaacgatctgtcagatctgtatcttggagtatccgtatcacgaaataatatttcttttctatatcatggacttatattaaccttccaattggaacacacggacgtggaaatttagaaagtatttttctgtggaacacacggacgtggaaatttagaaagtatttttctgtggaaaataattaatttccacctaccattggggccttaaaatccaccaccacatgatccacagagtatataagaggtataaatgaagggagagtcagtagtatggaatcagtctgcagtgaacattcgccgtgtgaacacggcaatatagagtgtgagtgcattttttgttgggagcatgacgcacagtgtaaatccaggaggagagaattggatttgggagagccaactggaagtgagagaggaatggccaacaattacgaacaatcaaggaacgaagatttatattgcaccgagacagtaccttcttcagctgcgttgcaagcaaacaccatcacggagcgagatatcagagaagatttcacagatcaaaccgttgataacatctacccacaattacacagcggctccagagcctctgaacagcttgaattcgcatttccaactattggaacaagaagctgggaaatacttatacgtcaatcttacgaacatctcaagccagattataaggaagaagattttcaatcacatattagacgtgttcgaagacagttattccccgaaaaaactatggataataacgggtcacaggcaagcacaacccaaatgttacgagacgacatcgaaagatgcggtattgaaagcattgctgacagcgcaagcgaagataacggagatggagttgatgggacgtgcatctccaccgtggatatacaaggcaactgtattgttaacgcacatggcaatgaacaggcaacaggcagtaagaccagaaagatacgagcaacaaccacgccagaatcaagtgaatcaaaaaaacataaaggcagcaataatcaacaaaatatacaagaacaaagcagtaccaccgccatcgccgacggacacgatatcgtcgacggagagctggatggaagaagtgaatcaaatcgagaaacagcatactacacattcgtcctccacaaaaataactgcaaagaggactggagatatatcgccacaacaagggccaagcaagcgccgagctttatcacctttgatcacggagaccacatccacatcctcttctcatcatcaaacacaggaggaaacagcacaagagtcagaaccagaatcaccaagtttcttagtgcaacaagcgcaggaaatgcagaagcgactatcactttttccaaagttaaatttctcaggaactacattctctattgcatccgttacggtatcgaaacagtcaatatctatggaaataaaatccaacaacaattaactgaagcaatggatacgtttaaagtactatttgaaaatagagatccaaacgacgtaatattagatgcagggtgcaaactgtatcatgaagaaaaaaaagaatatcaacagaaaagatgcggacaacgaaagcaacaaaacttaacggatataatccttgataaaataaaagaaaagaaaattacaacagcacaacaatgggaaaatatcatcgaaccagaattcaaaatacaactgatgaaagagtttggtttaaatgtagacagttatgtacaacggattgtaaggattgaaagaacaagaatacaacaaataataaaatcaaaaacgttaactgaaataatggtggagatattaaatgaagaatatatcaaaaacttcacacccggagaagacaactcaaagctacaaaacattatacaatggatcgaatatatgttcaaagaaaataatataaatataatacactttttggcatggaatgaaatcatcaaaccaaaaagatacaaaaaaatcaacggcatggtactagaaggtataacaaacgcaggtaaatcgctaatattagacaacttattagcaatggttaaaccggaagaaataccaagagaaagagacaacagcggattccacttggatcaactaccaggagcaggatcagtactatttgaagaaccgatgattacaccagtaaacgtaggaacatggaaattattattggaaggaaaaacaatcaaaacggacgtaaaaaacaaagacaaggaacccatagagagaacaccaacttggatcaccacagctacaccaataacaaacaacgtgcatatgaacgaaacctcacaaatactacaaagaataaaactatacatattcaaaaagagtatacaacacagagaagacaaatatactataaatgcacaaattcaaaacaaactcatcagtcggccaccaggtcttgtagagccaatacatatggcaatcgtgttcgtgaaaaactttaaagaaatatataaattgatagaagaagaagacaacgcacatacagtaaatgaaaaagcaatcagattaagtgaggaagcaaaacaagaagcagaggaatggcagacagcactacaatggaacacgatggaagaggaacaaaaagaaaacgagaagcagacggaggatcaggacaaggagtcggaaaaggaaacagcaacgcagtaaaagaaggatatggaccaaacattacggaaatggtcccaagaaatatattcaataaaggaaaccacaccatttatcacgtggttaaaacacaaaaatatctagacttcaattatgtaaccaatcaaaacccatacattatcccgtaccaaacagcagggttctggggatcaatgtgggaccaaacagacattggaaataatcaaagtatcaatatcatgaaagcattaaacgctgtagcactaggagtaacctggatcaaaggagaaatcacattcgaagtatattcagtaacaagacagagactgctaacgggaacaacaaatcaaacaacttgggacttcgaaacaagtcaaaacatgttcatcgcagacgcagacagagaaccggaaaatttcaacctagaaacagttgcagcaaccggaccattagcacaacaaacaacacaaacattactattcaattctcacaatgacagatacacaaaatacgaactaccacaaaggaaccaatatacaagggaaatcaacttccagcaattaacaaataactatatgtggagaccattagatatcagcaaagaaacaaacttcagatccctaattccaatgtcagaaggagtatatacaaaatcggagaacttgagacaaacggaattcacatatgaaactacaacatatgccacgtcaggagcaacaacgaggcaaaccctattcaggaacagaacatcatatccaagaatgcacattgcacaaccacaagttccagacgaaacaggattcatgaaattcagatatcaagtacgaatgagcacaaaactacatttaaacttccacatgtatccagattacgccacaaataacaaccttgaatatatgcatagacaaacaatcttactaccacaagtagcagaaactaatggaattgtagcatgtatgccttatgaaataaacactcaataaaaatataaaaatataaaaaaacataactcaatcgaaagaaatacctataaaaatccccctgataatgtccaccacagaaatatactgttaaactccacttgttaaactccacctcagaacacaagctaaatttccacctccgatgatccgaaatcccctgttaatgtccacctcaaagtataagctaaatttccacctccgatgatcctaagagaaagccaacattagttcgggatccccgtgtgtcccctgttaatgtccacctcaaagtataagctaaatttccacctccgatgatcctaagagaaagccaacattagtccgggatccccgtgtgagccgataggctagggtggcgaagcttaggtttactgacgtcacttcaaatacactcaaaaaaattaagtttctattagaaacaacgtaatacgttttaatttttttgagtgtatttgaagtgacgtcagtaaacctaagcttcgccatcctagcctatcggctcacacgggg

SEQ ID NO: 177 - DNA, 6085 bp, Fenneropenaeus chinensis hepandensovirus
  source 1..6085: mol_type = genomic DNA; note = Fenneropenaeus chinensis hepandensovirus - NC_014357
aaaccaggggggtgtggtaagagtcctctccgagtggtctagcagtgcagtactcagcaagatggcgagcaaaggtgaatattattattttactcctagagatctatggaattttgtgaataccttgctcagtcataagataagtactatagctatgaaaatgctgaccatgaaggagaaggaattcttgagagaagtttggataccgtatatacaaggtttccagacagctcatgacttgggtgtagataacgataagtgcggtgcggcgggaagtgaatacaagaaagtttttctcgatgaggagaagtttatggactttgtgacatctttccgccgcagcgtatttataagttatggagatagatggagacaggatggatcatattttatggcagatgtattttggagtcatcagttaagacagttttggatgatgatatttggagaatgtttcagagtaaacatgtcaccatgtaagagattgtatatagacatgttaccttattattatttagcaaagatgacaacagagaatagacatctagtagagtgggagtatatgaatccatgtcctaacacacaagtaaggaggaataagatgactggtatgaatttttgtaagcaaggagttgtgatagataatgagtatccagacaatcagatgggttgttacaatatagatgaacatccattaccaggaggtattagatggagtggtaataacgagtatcgtacaggttatgtacacgttaataaggtgaaatggttgggagttgcagataaagtcagtgacatggaggagacatcaagtgatgaggaggtgcccagcagccaggagaaatacgtgaagagcaaggagaagaaggaacaacagaagacagagaagaaggaggatgagccggcgaataagaagaggaagttctcgcttactaacacagtgttggagaagcagaagatggagttggggaagtttttccgaatggaagaggaaccaatcaacatcaagctatacgaattggaggaaggaaaggaacaccatgtacatgaggctatacgtatcgatggtagtaactctaagttcgctaagaagaaagacgagcagggtaatgttatggatgatttcaaggtaattgtttgtgatggagagaataacttgtatggtttttttgcaaacacacaattgaataagttatttaacaaaagacatggaacaaagaaatatagtatgaaaccagaacacaatataagtttaaaggtttcacagatttcagaggttaggaatggaaagatgtgtattgtaaagatggctattaatgatgatgtaaaatgtttcgccaggtaatgaagttgaagagagaaggtatggtggatcataaccctcttgttacattttactctggtataattgtaaagtttgagcattggaataataatgtcagtaaagtaagaaagtttttgtataagtttgcacagtggttgtataaggaatgtacatacatccacaatataagtgccgcagttcatgatagatgtaaagatgattgttgtaaagactcagccaataaagtatgtaagaacatatatggtcctcatttacacattttattggagagtgtgaatgagaattggagtaagagtagcaagagggttttattccgcggctacgagaagatcctacagcatgaaaacaaacagctatgggaggacctaggactacagaagacatcacctccatcaatgagtctatgggatggtgagatgtttaagtggtacatgttcagagataggaaatatgcaaaggtgcatggaacatactactatagtagtaatgaggaattgttgagtaagttagtaaagatgaaggatacacaggagagagatgatttgtatgagaaggcatgtcaattcaagaaagataagaatgcagcaagaaagattgagaacagtactgctaagacattagatggtgctgatagtgacaacataaggttaagcagttctagagctatatacctagagaatttacaggtactggagaagtatctagtaaagcataagtgttacacaattcaagattttaagatgatgcaaaggaatgaagatgaaatttgggtgaattacatgtatgatatacagaatttagagaaggtgatagagaagttgaacattatggagtatagtttacaacaagcagattacattgagggaaatacatggataggagaggatttatggaacactaacagtgcatacatgaggactgttaagagaggtactgatagatactattggtatattcagagacacgtttcaaatagagccagtttgattggacagagcagacagatttgtattgatggagcatatatgatgtttaatatcattgacaacatgagagtagagtcaagaccaaagacaataccaataataagcaagaataagacagtacagtggatacaggattttatggatatcatacatggaaatttacccaagattaactgtatgatgttatacgggaatagtaacagtggaaagacacaattgattgaagctttgacaggattggtaaatacagccataatgacaaatgttggtgatggtggaacattccatttcagtaacataacagagatgagtacaattgtagtagggaatgagaccaagattaggactcagacaattgagcagtggaagggattatgtggaggagagaatgtaacaatgcctatgaagtataaggaacacaagactcatatgttcaggaagcctgtatttttgactaatcagcatcatccactggtagacatatcacactatgatgacagaagagctatagagaatagaagtttcatgtataaggtagagttaggaagtgagccagtaaatgcacatataaagtttcctaataggatgattccaatcaagaagaatccagaactaacacagtttgtattggccagcatgcagtatgttcatacaaattatatgaacagaccagacaagaagtttaaaattggatttttcaacaagctttatgacgcgctgtttgagaatagctaaatctatgtacgcagggttcaagttttcccggcataaataaagtgataagataagattgagagtttgaatatccacgtcacacacaaagatagtataccatgagtctagcatgggagcagtcgtatctgcagttgctgcagtaatagctgtagtagtcgaagtcgtcgagttcatagtcgatgtcgttgaagtggctttcgtggttgcagaaactgtacaggtcgtctgcagacacagtcgattactttgttggcggcgatagtacatgcgcagaacgatcagcagcaatccgaagacctggtggaaggagttaacgaaattaacgacagaacaacatcgacggaagtaggacgtgagcacagggccatatgctaggacctgatcagctacgacgaatacctggagagagcaacagaaatagactacatgtcacctacaagaaaaggaggaaattattttgcaagtaaacattttcaaagtaagaagaagaataaactaggaaaagtaaaggatctactagcaagcaagaagaaggagagaaagtttaaaggaaaaggaaatactttaagtgaggaaccaagtacatcggggtggaaagatccagtaagacagagatttccagcattagaacaagaagagagaaatacatttgcaggattattggcaatagaagcagcaccggatcagagacaactaggacgtgatagtaacaaccagttagcattggtacagagagatacaagagtagcagtaagacaaagtacaaacagaagagaagcattagaagtagtaagagcagcaactcaagcaataagatcgggtggagatagactagcagaattagtacagacatacgcatcaggattttcggacagtacagaaatagtagagctaagacaagaagatagaatacaaagagatatattccaagaagaaggacaaaacttattagctatcgagatcgcattagaaggaccaagcagtgtaacacagcaatttgatcaagagaaaactccagcagtcaagagagctttagaactaactcaagaagaagaacagttagaacggatagaaaacgctaagaagtatattgaggaggttatagaggagaccaatagagaatttgaagatcaagtacgacaagagacaagtgcgtcggcggaagatacgatggccagtgccgcacctactccgatggaaacctctgagccaggggttaccgccgcaccgcaccagaaatctgcagcgggcggtggtggcggtggtggcagtggaggtgagacagcagggtatggtaaaaataccaacgatgccttccagcgccaccgcaatagacccattgatctcaaacatattggagacaatgtgtatgtagctcagagggtttataaagtggaggctgaatgcaagaatatagatgagaagttgacatggtcaaacacagcaaacaacgaatatacacgaaggctgatgggaacgaatggaaacagcgacaaaggtaatgttaagttcaactttacagcaccgatcaatggaagtattggaatgggaaatcttgctttgggtaactatataaatgcatggggtatagacaacattgcaaagagtgaagacagctgggctattatagctacaagaggcaagatgaaccatttacaggcatttgagatgattccaccaaatgcaaggagaaactgtagtagggtatacaagtgctccagtacagtttggtaagctattgggacatatatattatccagatccaaaaggacaagaaaagataaagatcgcaagcttggagaatggcagagaatataaggtattcaacaacgcattgagaggataccaaatggacgacgacatgaatcagacaaaagtcacagcagctgacaataaggtacatgcatttacagacttacgagatgcaccaatgataagtcatgtagcagcgtacctgaacaaagaaaacccaccagcaatcaatggtataggaatagaataccagggatacgacatggccaatgagggtatgtcatctctcattggagtaataccaagtaactgtataaataaaaggaaggaaatacagtcaggtatggataatgtagtactctggtctatgcaaagtaacaggctcatagacaaaagattctggacaccagaaggatggagtgagacaagtgcaaacgatatggctaacaacagagtaaacgttcctgcagagaatggtgtaatatatgacgaagctcatgtaacaagaacatcagactatgcagaatgggccaggaatgagatatactacaatgcaggtaatgtatacagtgagtttgcaccaggtaacagtggagcattcacaagcaagtataatataagtaaccagtatgctacacagattttcttcatgccatatgctcatacacagcgaggagcgatacaagatatcgtcataaacttcgacctaacactacaaattatggtcaagaggattccacgtcatgtgtataatgatttctatcacataaacactagagcagtgggtccaatagtgtatgaagaatacaaggaaagagcatttggagcagctgatgtaactacaagagctaatgagatacatgtgaacataagtggaactcatggaagtaagtatgcagacagaggacaagtatcatggaagcagtcagtaagaaaggagttcgccaagagacagtatggacaaaaaagaataattctgaatcaaggaataaacacaagaagagtaacaagaagcagcagtgcggcggaggaagatgatataccagaagattgtgacgacttcctagaaacttcagaaatagagtcgccgccgcagccgcagtcgcagaagaagaagaagaagtataagactattgtataatgttattgtaatacaaatgtacataatgggttataataaaggttctataaaatcacgcatgcgtggtttaaatctctagaggagcaaccctcagggggtaggtagggggatctttgcgatgacact

SEQ ID NO: 178 - DNA, 4442 bp, Mouse kidney parvovirus
  source 1..4442: mol_type = genomic DNA; note = Mouse kidney parvovirus - NC_040843
ctacgaaactggcagggcgcccgggtagtcttccacgggggcggggcctttgttaacatgtgttaacgttaacgcacgcagtgcgcgcacatgcaaaggccccgcccccgtggaagactacccgggcgccctgccagtttcgtagcagtcatgtgttgttgtcctttgtgtggatgtgactgtggggacacggaacagaatattctgattcgcttgatatgccgggcggaggtaataaatacaggcagtggtacgccatgcgcgccagactccgcgcagcaggcgagtgggacgcgcatcgggcgggtctgtcgggattgtctgaagcaactcgaggagcacaagaagacgtgccagatcttactgaacctgatacgcctgactctgcagattcatcagctgcaaagcgaccgcgtctagaaggagaaggaggtgagtcagaatcggactctgtaccatcacttgaagggtctccaactgccgaaggtaattaaaaacctttttttatatcttcttacagatgtctatgtggtcaggacctacgggattctctctcttgcttattagctcgcatgctaatgctcaagagctcttggaagatgctatctgcctgctctctaaccgctggcatatagaatttgagataaaaaaccaagataatgtctggtatgcctggggaaaacaaagtagattcaccgtaggggaatctactttacaaagagctctcggtgatctctattcacaggagcttgtcacctttcagaagggaccaccggacacttcctttgacagcgccctacgctaccaaaaatgcaagcgcaaatggaacgtgcccgacgtagtctctctgccctcagacgatactggtggggcggcaacgcctgtcatcagctttcggaagaaagcgagataatttcaccagaaaatctaaaacaaatcatgcttaactgggactctcgggtatggcaagcctgtgtactgggtatctgggatactgtacctgtcagagatcctagaccttattgcttcttactaaccaatattccttctgttaaaaaatggttaatttgtgctgaagaagatagcaatgaacagactcacattcacctgttagctctcacctcacagagatcagatgcttttaagagaactttagaaaaaacctggaaacaggtagctatagtagccatgtcagatatagaagaaccagatccaaccttagagattgtcaaatgtcagaaatgccacaaaccgagtagtctgctcgcttacatggccaaagatccacattggatcgcagccaatgacatgcaaaccttaggcatctttgaatctgtctatgcgcatgactggggacagaggttccgagaaaaacaaaccttagacaaagctaagaaaaccgatccgaccacctcacagatgcatactatcacagctgagatcacagaagtcattatgcaacacaactgtaaatcggtagaagactgcatgaaagcagcacccactgtgattgctaaacatttacacagagccggtttaggcacgattatccagaattgtattagctgggtgactgccacaggagggggatggtcacttcctagtatcggagccaaacatccacccgagccagaagccattcatacaatcttattacaccaaggaatttcaccagctgactttgatccaattttttataaatggttagctaaagaggaaactaaaaagaacaccctagtcctctggggacctagcaacacaggaaaaagcgcattcatcagcggcttaaaaacatgtaccaactggggagaagtcgtaaattctaatacttttgcttttgaagctttaatcaatgctcaattaggagtttgggaagaacctctgatctcaccagaactagcggaaaaagccaaacagatctttgaaggaatggaaacctccattcctgttaaatatagaaaaccagtcaaactaccacgcatacctattattatcaccactaatcatgctccctggcgcttctgtactaaagaagaagagatgtttagaaatagaatgtacattttcacctggtctcaaaatatgcatgatacaccatttatttgcagagctagtgaatatagctgccaatgccgcgtttgtcaaacaagtcgaggcggccaggcttgtgctggtgggcaatcagctggcagcttgcagagaaaggaacaatccgtttcagaattggttcagcccgaaccctcgtcaagctatgtttcaacccgatccttgcctgtatctcgagaagaaacaccactacctgcagcagaaggtctcgggagccaccaccagcgacattgcagcagtccaggaggggagtcgatcgaacgcacccacagcccaagacctagctgcagcaccggctcctcaactagcgacagcctacgacccagtggggaacacagatccagcgatcccggagcaggaatatcatgttccttctccgggagccttgagtgtgtggagtcccctctctctggaggagacgatggagatgatctcccaagagatagaatgggagaacctacaagcccagatagctcgacaggtagctcagatattagcagacctagaggaaaacgcagacatagccaagaaatggtggtgttgggggaaacccaaagcaaaaaaacacgggatcaggtttcaaccgccgtcacaggcatgggtagggatctgggcaccttaaatattcctacacgagcacaatggttcacttatctatcttatttacagaaacactatggctgaagatgtcacctttcataacacctacatggtctattggaaaaatcaacccttcatctatccaaacaccaatatcaatccaccaaatgcacataccatgtcagccggagctatcaatactggatggcatataatcccgactatcctctggaaacatttcctcacacccaagcaatggacagaattcactattaattatgaagcatatacagttaaaggatattcctgcaccatatataatcctattcctatgacacaacagctggcaatccaaggcactaccgctttcactgctttcaacaataccatctatacactaggagcacaagatgatttatatgaaacagcatatcataattggtatagtgacgacagcacaggagattacaaagctttcaatctatcatttaaagaaggacagtacaaaaatctcagtggttcatggaaaaaaaccatatggccaatatactcatggagaacagaaaatgcccgaaatgcctcttcttccacctactcatatctcaatggtatagatagttatgcagtatggccaagaacaaaagacaaagagttaataccaacaggggtattctgggatccattaaacgatgcaaatgggatattggaattaagacctggaaagaattctatgtccttctcctgggaacaacatccctgtgatgaaaataaatggtttaacattgatcaaattgcaaagtggtttccttacaccgtcgatacaccttatctaaacccacaaacctatggtccacccggttcctataaactatatggggaagacgatcctgatcaactcaccacacctagttcctggacggcctacagtgccaaaaatgactacaccatacctaatctgctcgacatgccaatagtacccatgcaatggttctggcaagaaatccagaaatccattgcagaagttccagatgtcaaaaaacccatgctatactgggcaggcacagaatatgaatgctataaatatggacctacacaatgcttcctcaaaggcattccattattcgatgataatgacacccatgtagccaccaccacacaaggctgtttcaggatcagtctacacctagcggggaaaaaaagacgcagccgcatctatgcaccaacatggggtccactctcctggagacaatgctatgccaccgacacgccattcgctcccagcatggtcagatacagaacaggaggagcgagaagaacgtggacaaatatcaacagagatgcagaaggagtccacaaagatttccactacagagaagatccatatgatatcacctcaaccgtcccagacaccagaggaacggcaacagtcaccgacagtaaagccaccatgcacccatatgaacaagcagcctccggcatgtacctcaaccataaggaaatgagacaagtccgcgcagccgcagaagcaacacgatctcaacctgctgtagccatgcaaactcaataaaaagtccctgtgtccttacaaaccacatccacacaatacaaaatcttattgttaacccgcctcccaatcttggcttcacttcctgaaccccggggcggcccagtcgtacagaacatgtggggccgccccggggttcaggaagtgaagccaagattgggaggcgggttaa

SEQ ID NO: 179 - DNA, 3873 bp, Penaeus stylirostris penstyldensovirus 1
  source 1..3873: mol_type = genomic DNA; note = Penaeus stylirostris penstyldensovirus 1 - NC_039043
tcataggttgtaacggtttcctgcgagcgcttcgcagaaaccgttacaacctatgacgtcataggtcctatataagagatgacggactcaccggtctcccagtttctaactgacgagtgaagaggctattccaagtgactaaggacaattttggaacatggaagatacgaacaaccacccatggcaatcaatacctagtccgtcattatttggatcatcaagtaacagtgaaccatcagaagtctttcaaaacgtcttcggggaaagacaaaccgaaggatacaaatgtaagtacaagtgactgactaagtgacgatccattaaattcctaattgacgcaagtgacgacgtcatatgcgtcacttacaaaagacgtaaccgcattcgtccatcactcacatatatctttctctacctttcagacgacataccccaacaaatatcgctgcgctactgcccagatcacattctaccgtggtgcttcatagggaacagacccgttctctactgcctctgcaacgagtgttttatagacaatctcaatgtcaacggacagtgtcaacactgtcatcccgacgacgaagaatggacagaaaatatggccaaggacatactgcatacacgtcagggcgaaccagaatcacttagtgaattgcttcgagaacgcacgaacgaaactcactccagccagggaatttctccaagccttctcaccccaggtccaaatcaagaccctaaacccactaccgaacaacttcttaatatgtctgaagaactgttccagttttcagacgaggaagacaactctcaaactcctccaagaacttcaacaccagaacaaactgatcctaaggtctgcgtggataacctgggaattcgagagggaacaggaaacggaacaattcaacttggaagtgaatcagaaacctcccttggaagtgttggaaacagtaatgacaggggtaaaaagagacagagaggaattacttacatcagtgacacatcagattcctccggatcagatgacgaaaatctgggtacaccacatcgaaataaaagaaccagaaactccaacaccacaaaagagacaagcggaggagacaaccgacgacatcaggaaagcgatcatggaagcaatggaaatcgactggaacctaccgatggaggagagagctgtagtagcggaacacaacccgactttattgaagggactcccaacggaccggacgaaatggacggaaggcgactggaagagagtgagattgataaacaagtggaaagtacaacatggtacaccttcgtcatcagagaaaaaccacaaccaagaagactctccggacgaacgccaaacttcaccattacagatcatggtgaccactggcacatcacatactccggacacccaaccaataagaccagacatagagctacaatcctcgcctatttgggagttacctttgctgccagagccgaagctgaagcgactacggtacttgttagaaatatcaagagatggatactctatcttatcagatacggtattgaacggctttcgtattttggtcttggccacgccatttttaaacgaatcatcaaatacttccaacaatacagaagagacgaagacgcagtagacggaccatgtccatatatgactactacaagagcagaccgcgctgaagaaaaacctaaagaaaacagtgcagaatatgactacctccaacacttagtcaaaaccaagtcagcaagaacagtacaagaacttgtcaataaacttgacgatgaagaatataaacaactatggacccgtaccagaggacaatataaagacaaactcagaggaatattaacatactacaacaacaagaaaaagtcaaaccaaagccaactgtcactaattacaaacctgcagaatatatcaaaaagaaaaccagactacgacaatatgcagtggataaaatacatgttagccaacaacgacatccgtgtaccagaaatcttagcttggataatcatcgtagcagacaaaaaactggacaaaataaacactcttgtactccaaggaccaacaggaacaggaaaatctcttaccatcggtgcactactcggaaaactgaacactggcctagtaacaagaacaggagactcaaacaccttccatctacaaaacctcatcggaaagtcctacgctctcttcgaagaacccagaatcagtcaaataacagtggacgacttcaaactccttttcgaaggatcagacttagaagtaaacataaaacaccaagagtcagaaattatgggacgaataccaatcttcatatcaacaaacaaggatatagactactgggtacctccagctgatggtaaagctctacaaacaagaacaaaaaccttccacctgacaagacaaataaaaggcctctcagacaggatgaacagccagtacgacatcaaccctccaccagacaagatcaccagcgacgacttcctaggactcttccaagaatacgaaaaagaaatcgacgacatcatagacaaccatgtgcgccgattcaacaagaacaagcccaaggaaaagatccaggagggatgcacataatgaagacgaagaacacgccgaaggatcaagtggaccagacccacacagatgtctacaattcaatactggagactcaatacatattactttccaaacaagaagatacttcgaattcgacgctgccaatgatggaaacttcgacggaaaaaatttatactgcctcccactacattggatgaacttatatctctatggtctaaagagcagcgacagttcagcaacagaaacacaacgatataagatggtaaaatcaatgatgaagacctacggatggaaagtacataaagcaggcgtagtgatgcactcgatggtaccccttatgaaagacttaaaagtatcaggaggcacatcatttgagactctcacatttacagacaccccatatttagaaatattcaaggatactactggactacataatcaactatcaactaaggaaaccgacgtaacattggcaaaatggatacaaaatccccaacttgtgaccgtacaatcaacagcagcaaactatgaagacccaatccaacaatttggattcatggaacaaatgcgaaccggtgacagaaaagcctatacaatccatggtgacactagaaattggtatggcggagaaataccaacaaccggacccaccttcatcccaaaatggggtggtcaaataaaatgggacaaaccatcccttggaaacctagtctacccagcagaccaccatacaaacgactggcaacagatcttcatgagaatgtcaccaatcaaaggaccaaatggagacgaacttaaacttggctgcagagtacaagccgacttcttcctacacctagaagtacgactcccaccacaaggatgtgtcgcaagtttggggatgttacaatatcttcacgcaccatgtactggacaacttaacaaatgttatattatgcatactaactaaatgtattcgatgtgcaatatatacccgattatatccagcttttaccaataaacatatatagcttattatcatctatacctaccctatatacataccagctacccaggcaaggtgggactccggctacccaggcatggtgggacacttttcttctattgacgacatatttcgtcacttacgtcacttacaaaagactaaaatccctatcgtcagtcagtcatttagagtcagggatattgtccgccgtcacttagagcgcgaagcgcgagtatccatcatttaaattagtggtatgacgtcacatattaagttaacggtttctgcgaagcgcttcgcagaaacc

SEQ ID NO: 180 - DNA, 3999 bp, Porcine parvovirus 7
  source 1..3999: mol_type = genomic DNA; note = Porcine parvovirus 7 - NC_040562
ggaacgacaaggacgacacttcgagcggacgacagcggacactcgaggaggtaggggtccgggtcccgccggctaaacagccgcgtatcgaggacccggactccgagggaccacctccgttagagggcgaagaaggggatccagacaaagacaactacgcaggtgagtgtataactgcttttgctttcgctttagatggcgggcgcgacacaggggttcacactgctgctagaggtggtagataggccagaaggctacaactgcgacaaggacctgctggaagaggccgtgctgctcctgaagacacgatggaacatcgatggggaagtatcccaggatcaacaggggaagtggtggggctggctgtgctgcagccgcttcctggtgagcgggttcacggtgggtaacgctctgggggatatgcataccctaggccacgtgaagttctaccgcggacccggtaaccagacaagacaagaggcgataagataccagagcctcaagaggaaatggaacatccaggatccagacgagagcgcaagctcgagcggtggagatggatcggcaacaccgtggtacaagagaccacgccactagagagcgtggctttaacgccagagcagctagaggtcgccaaagcacacataaacatgcagcaatggcaaggcatggtcatgatgctaagcaacggcgaaggacggcctcgaacacagccagacatccgcgctatcgctttcctgctatcgcaactcaagacagccaaagattggtgcttcgtggcagagacaaacacggacgggatcctgcactaccactgcatggtaaaaacaagccagagatcggacgcgctacgcgacagcgtgcagagaaaatgggaacaatgcaaactagcagccatggaagacatcgaagaaccagacccacaaatagaagtcctaaaatcacaaaaagctcacagaccagcctgcctgctggaatacatgatgaaagggccactgtgcttctgcgcctacagcgatacaacgatgacactaggagccagcatcttcctgtacaaccagggccagagattcgccgagaaagagaaacaaaaacagaaaagaaaacagatcctgggacccgaagtgctccaaggagcacacagcctgacaagagacctgctgggagtcatctacacctacaactgtcaatcggcggaagacatcttcagaaacgcgcccgatctggtggtggcgcacctacacaaaccaggattccaacagatcgtcaagaactgcctggggttcgtggacgccacgaaagataactggtccatgcaagacaacgcacgcaggacgccgccggatccgacggcgatccacacgtgtctggcgcaccaaggcctggacatcgacaacttcgacgcgaccatgtacgcgtggatcaccaaaaagagcgacaaacgcaacaccatcgtgctgtggggtccgagcaacacggggaagacggccttcatccggggactgagacaggtcgtcaactgcggcgagtgcgtcaacggacagatcttctgcttcgagggcctgtgcggcaaagccatcggcatctgggaagagccgctgatcagtccggagtgcgcggagaaagccaaacaggtcttcgagggggctccgacacaggtgccggccaaatacaagaaaccacaggacctgccgagaacacccatcatcatgacgaccaaccacgcaccctggcgcttctgcacgagcgaggagggggctttccgcaaccgcatgttcatatttctctgggacaaagactgtactgacggtgtgttcgttcgcagatccagcggtagctgctgccaatgccgtggctgccagggatgcggcggcggcgaggttcctgctcagcagcgaggcgctggccaagtgccgggaggacaacaatccctacaaccagtgggggctaggcttccagggtctggagccgacgtgggcggtggatgctccggacccgtgtcgggaggcctggaaagcggcgacgagcgactactatgcacttcagagtgcggagaagaccttagctggagcgacgacgacgtccatcgacgctgcgcaagcgtctcaacgctcgaatgcgccgagctcgcaagacttggcttcagcacctgcaccgcaggtggcgacgagtggggatccggtggggatcacggatccggctatcccaatctccgagtatacagtgccggaggaggggatggagtgctcgtggagcccgagcagcatcgaggcggtgatggagcagatcctggaggagatggaagtggagccatcggagcgatcactggcggtcctggaggagatcgagagcaacatgcgcgcggcggggatgtggtggtcctggaacaggggtcgcagcacgggcatcaagtggcgtccgaagaatcaggggtgggtggggaggtggatcccgtgatggtcatccctactaaacaacattggtgtgcttatctgtcctatctagagcattgcttcggtgatcaataaagcgcctgagctcaatcatggcagaacacatcaccctgagtaacacgttcatggcctactgggaaaacgatccgtaccaatacccgtcatacgtacccttccaaaaaaacaatgtcctatcctacaacacgggatggcacatattacccaatatcctctggcgacatttcctcagtcccaaacagtggtacgagctctgtatcaattacgaggcctaccacgtcgagggcaccagcaccaccgtcttcaatcccatacccatcacaaacaacctggccatccaaggcaccagcaccttcacggccttcaacaacaccatctacagcctgggcgccaccgacgacctctacgaaaccggataccacaactggtacgaagacacactctggagaagctggtacgtggcctacaaagaaggtctcgtccctaaaagaaacgtcacaaccaaagaaggaatcggaaacagctgggacagactcacactcccaagatacctatggtcagcaccagcaacagcacccgaaacgaactggacatgggggtggaacaccaacaagggagaaaaggccacggcatatccaacagcaggcacaacctggccacacaccgactccgcgaccgagcagagggccgcaccagccggatgcttctgggacccactcaccaacccggacagcatccaagaactcaggccaggaaaaaatgccatgagcttccactggaaaacacacggagccgacgaacactgctggtacaacctagacagcctcgtcaagctatttccatacacaccagaaagcggatacagccacaacatccgagataaaaaatacaaaggaccaccaggaagcagaatcgtcaatgaaaacttccagcatccatcgccacaaacctccatcagcaccgaaaaccacaaagtcttcatagaacacgacgtacccaatgtcctcaacgcacccatcgtacccatccaatggttctggatagaactagaaagaaacctcatcgaagacaaaaaaattgaaaaaccacaattaggatggccaggtacagaatgggcaacaccaaaatatccacccatgaataacttcatcaaaggaataccactcacagacgaaaacggaaccctcgtcaaaacagtcaccatgggatgcttcagaaacagcatacacctatcatgcaaaaaacgaagatccagaatgttcgcaccaacatggggacccatgtctgtagagatgacacacggaatagacagcgccttcgtattaccaaccgtaagatacagaacaggaggagccagaagaagctggcaagcaaaaacaagagacgcaaaagacggacaaacagaacaaacatggtatcaatggaatccatacggaacaggaacatacacgtcgacaacaacgacaagcacatacacgacaacaaccagccgaaaataagaagctaaaccagtgtcttctcaacgcca

SEQ ID NO: 181 - DNA, 4222 bp, Rat parvovirus 2
  source 1..4222: mol_type = genomic DNA; note = Rat parvovirus 2 - NC_055465
gcgtacacacagggcggagccagccagcgaactttgcgctctgttatacgtagttgaatatgattggtgtggatgtgattggatagggacacagtttcctggtaggcgtcagttgcggctatgccgaaggggaataaatatcggcagtggtatgctatgcgcaatcgcatgcgccaggacggcacttgggatcctgacaacttcgtccgtgatcggcaacgcactctcggcgaggtgggcatcaacgttccgtctgaggccaagcgtcctcggcttgaggaagttgatgagagtgaaatccctgaactggaatcttctcctacgcctgaaggtatttattctttttgtttttctctcttttagaatgtcctggggaaatcagtccacggggtttagcgttctgatttgggttaacactacgcctgatgatgaaacttctcctagcgatctactgctggatgcgatatcactactgtctattcgctggggcttagaatttatccgagagtccagggacgacgaagaatacgcctggtgtacgactacaaagttcacagtaggcgaagcaactcttcaacgggctctgggtgatcttgcctctgacgggtggctggggatcttacgctgttcagcttctactaccttagatacagctattagatatagaaaatgcaagcaaaaatggaatgtacccgacgtggtctcacagccgcacgacgatacttctggcacaagggatcagccgtggaaacgacggaagtgagcatcgaggatgacacattaaccagaacactacgtacctgggactccggaacttggaaggctgccatcttacagatttcctgtctagggaaaccgcctgtggaagaacctgaaccttatgctttcttgttaaatgaaatgcctatgaatactgattggatagctactggggaggctaattctgatgggatctttcatgttcatgcactggtccgcaatcctcagcgcactgatgcctggattcgcagtgctaattctaaatggttctctgtacgctgtgctaccttgaatgatgttgaggatactgatcctatgttaaccattctaaaatgtcaaactgctcataaaccttcttctctggcttgttatatggtaaagaatcctgtatggcttattgctagctctgcttttaatttgaaagtcttgtctggtcttcatgacagggatatgggtgatagattcagacctgagaattctagaaagctgaaactggatgctaataaaatgactactgacctgatagatattatttctgaccacaactgtaaaactcctcaagatgtctttagatgtgcacctgaagtgattgtacaatacctacatcgtcctggatttggttctattttaaacaactgtcttgcttgggttcaggctacacagggtggatggtctatggctaatattgctaaaaaacacaaacctatgcctactagagtacaccaagtacttttacatcagggaattataccttctgagtttgatgagatcttttataagtggatcactaaagctgagtctaaacgcaatactcttgttctatggggaccatctaatactggaaagtctatgttcattaaaggatttaaagaagctgtaccctggggagaaattgttaattctaaccagtttgcctttgagtctctgtgtgaatctatgtttggggtatgggaggaacctttgatttcctctgagcaagctgagaaatgtaaacagatctttgaagggatggaaacctctgtacctgtaaaatataagaaaccttttaaactacctagaatacctataattatgactactaatcatgcaccctggagatactgttctaatgaggaacctatgtttagaaatagaatgtggatctttgagtggctaaatgattgcactggtctctattcttgtagagctagtgaacatagctgcgaatgctgcgtttgtaaagcaagtagaagcggcaagggtattaatgacgggcaatcagcttgcaaaatgccgagaggacaacaacccgtacaagggctggctttctggattgggagtacagaggacgatgtttctaccggatccttgtgctcaggaagccaaggatcatgcagaagccctgagaggggcgactgtgaacgatctaccagcccaacaagccagtgccagcagcaatgctccaacagctcaggatctagcagcagctccagctcctcaactgtcgacagcttacgatccagtggggaacaccgacccagcaatcccagaaagcgaattcgaagttccgagtccggggatgcagagcctatggtcaccgagcagtctggaggagatcatggaggagatctgggacgacatggaatgggagaagatggaggagaccatgcaagtggaagtcatgaagattctggacgaggtggaggagaactcccgtctagctcgtctatggtggtgttgggggaaacctcaaacacactcacaccgcttgaaattctcaccgccgaacgggaattggataggaaagtgggcgccctgagtattcctacccgtaatgattggctctgttatttgtcctttttgcaaactacctatgctaataaatgtaatctttgatttacagaataaacatggcaactgatgtttcattctccaacgtgttcatggcttattggtctaactcaccctataactacaaagtgagtggtgctggaagagatcataccaggccaactggcacaccaataaacaccgggtggcacattctacctttgaccttatggaagcattttactacagctaagcagtgggcagagttagtcattaactatgaagcatacaccgtcaaagggttctcctgcaccgtttataaccctgttccgatgacacagcagcttgctatccaagggactacgacctttactgcctttaataacaccatatactcattaggagtcaaagatgaactctatgaaacttcctggtataactggaatgatccggctggaacaggtggattcaataactttagcttagcttataaagaaggatactacctagatagtcctagagcagccacccaaaaaagaacattgctccctgtttactattggaaaagtccaacaccagaacttaactctgtagtcacctggacttgggaccaagaatataatagtgctgcagcaggcttaattggaaatgtagcttggccaatcactggaacaaacaccatatctctaccagatggagtcttttgggatccgctgacttcaccagatgatattatggaacttcgaccaggaaaaaactcaatgacctggagctgggaaagacatgattgcgatgaaaataaatggtataacattgatcaactagctagatgggcaccatacaccgcagatatgccttgggtcaatttaggaagaattggaggagctggatcttaccaaccagatgacattgaagatcctaaatcattgtctggaccaagatatggaacaaacccagcaacagaagattacaccataccaaatctagcaaacatgccaatagttcctgttgcatggtggtggatagaaatgcaaaaaagcattgtaggaacatatgatgacaattctagtccacaaaaagaagaagcactatatggtccaggaacagaatatgaacaatataaatatccaccaactcaatgctttataaaaggactaccattatttgatgatgatggaaatcatataagcaccacaacacaaggatgttttaaagttactttacatttagctgctaaaaaaagaagaagcagaatctatgctccaacatggcatccacatacatggagatttacacatacaatccatgcaccaagagtgggatcatacgtgagatacagaacaggaggagcaagaagaacatggacaaatctaagagcaggaccaggactaagtggaacaataagagtaagatcaacgccatacaatacaaattcaacatatgcaacaacagcaacaacaagaacaacaccaacaacaagtaccagaatgaattattaataaaaagttcaaagcgtataagtgtctgtgtccattcaattccacatccacagatgtgtaccaacccgcctcccaacgtatggccctgaccactagttggcgctggtgtgtggtgcgcggcgctccgcgccgtgaacgttaacaccacacaccag

SEQ ID NO: 182 - DNA, 4001 bp, Syngnathus scovelli chapparvovirus
  source 1..4001: mol_type = genomic DNA; note = Syngnathus scovelli chapparvovirus - NC_055527
aaggccagtcacgtgatgaaggttggcaagaataatgttattgaggttgagtgaaagaatgaaggaggagtagctttgcgggctagactgcttacataagcactttatataacctttatataactgacctcaatagcttccagatgtacaagggcggtgcctactaaacagtataaaaagccaagacaaaaacaactgactcactctggagtcaaatggacagaaggaaagctcaaaagagacactttgccattcagaagaaactagaagcaaagaaacaaaagaccgaagctgaacacgagcaacaacaggaacaacaagtggaaacagcagagcctagcacgagtgagtatgagcgacagcaaattcttgatcgagacaccagagaaggatccagtacgacgcaagaggatccttacggatgtcaaaaaacttttgcttgccagatatcacagctcacaattcaacctaacgcgagagggcttgattttccactgcacgagattcagactgaaaaataccacggtaaaggcccgtctggggaccctgaaccgcatggtagcactcacgagatttccagaaccgtcaatgagcttacaggacctgctggagctcaagaatctggaaaaccactacaaagtcccagactacgaacgctactaccaacagcaacagaactcagcgggccaggaggaccccgaggaaccatcgacaccagaatctccgggtccgcccatcttgatggaccaggaggaggaccaggcattccggctctacgaggaccagaacacaactggagagaacgagtagtaatgcttcaaaccatctacgcatctgacgacatctcagaagacttcaaagaagcctgcacacaagccaactacgcagattacatgcgcctcatcacacaagtaaccatccacacttttaacgccatcgtgatcaccatcgaaaccgtgagtagcctttttgagtggctggaacacaattcacaactatggctcgtgtcaagcgaactgtccgaaggcaacgtactccactaccacgtgcttatgtcaacttccaagagatcggacaatataaaacgtaccttcaatcagagcttccacaatgctggatgcttcaaaagtcagaaagtgagatcgctgcctgctctcctccgctacatctccaaacagcgcatgtctgcatggaccaacagcgaactgctgctggaagcatcgacgatagcaacctacagtccgctagtacgatggcagaccgaggaaaacatcaaaaatccgatgaccaaagacatcttacacatcatgcacaactacaatgcagtgaccttacaagaaatgctggaaaaagctccagaaattatcgaaaatcacctacacaaatccaacctacaaacggtgatacacaactgccgtctgtactacctgacgacgcacaagaaactcaacctactacagaacctgccaaacgggacaccgaatccggcaaagatacaccaatacctacgcttccagaacataaacaccgacgaattcgacaagaacttcacacagtgggcgctacaactccatccaaaaaaaaacacaatcgtactacatgggccaagcaatacaggaaaaacatcgttcatcaggcctctgctcaaactatacacctacgccgaagcgcacaacgaaaacacattcagcttctcaggctgctgcggcaaagacctagtggtgtgggaagaaccactgatcacgtcagccaacatagacatgtgcaaactgatattcgaagggactccgacagaagtaccacacaaattcagagatcccatccggatggcgcgcactccgatcctagtgacaactaacagaccgctgtggcaattcgtctcagcggaagaagccgcaatcactaaccgctgcttctattacaggtgcggaaacaccatcactagcgaccagattgcaagagcgtttgcaacaaatagtagaccttcaccaacaactggccagacctatcgatgtcgcattgagggtggccggccaaccaggatacaacccagcaccagtgacatcagcactacaagcggcgggtggagccttaagccaagtagacccagcaatacaactgggcaatacattgctacaggaagccaagaacctcttcaacgacctgatctctccactgacgggcctactgggaggaacaacaacaacggacgaagcagcaacatcactgagccgaatccagggggctccaacaccacaggacctrcaagcatcggtggcaccacaactgaccgaggggggctacctgaacacggacccatctcaaccacaacacgcggagcaaataccgtctacgtcatcgcagacactcctttcgcccagctcagacgtgttgatgacagacatattggacctgaactccgaggaagaccaactgatcaggagactggtgaagaactcccatacactcttaccgaactcttttgcgaagctgacgggggggatccagctcaagctgaaacaaccagtggagtgggcgggccgactgatccctccggtctaggagcacccatcaacgagcaagactgggtgaactacatccactacattaaacaaaccgcgaataatgaaattctctaatagctactacgcttatatagaaaaccaaaaaaacgactatccagacataggtctagaacgaaacccatctgaataccaaacgggctatcaccgaataccaaatcaatattgggctagcttcctaacacctaaagattggttcaaccttatctacaacaacaaagcattccgggtagtaggagcaagatgcacggtctcaaatatgataccactcactgagcaagcagccatacaaggtaacactacaatcactacattcaacaacaccatttacgcactgtgctacacagacaacaactacgaaaccgagtgggaagaaccagcagccagagatctatctttcatgtggagagaaggtctaactaacggcgcgcgacacatgttaccaacttacaaacacggaatctaccgaacaacaacatcacaagcacacaacgtattctacgggtgggatccactctgcaaagcagaaaacatactagaactaagaccgggcaaaaacgcagtcacattcgagtggcacgctaaagaagaaatatggctgaacacacacatgatgcaacaattcgacccaacacacacaccggggatagccaacaccgctacagtgtactcacaagaaatacacaaccagacccattccaacgtaacaccgcactcgcatctcaacagatggatctcacaaacagacacagcaccagccactgcgcgccactggtccaaacaagcaatacagagaccagggataatggaacaacaattccgatacccgatacccaactggttcatcaaaatgataccgcttttcgattcacaaaacaatcttatcaaaactaccgcgcaagtactcatcaccatggaacttacagtcgacactataccacagtcgctcgcaataaacatgcctattatagacgacattatagcgccaaaccatactccaaacagcgtaccatattgcatgttccgctaccagccaatcatacctatcaacgtgggcgtattaccagcaccaccgacaaagggagtattcataccagagctcccagcacgatcagacccgacttcggatgtcgaatagaggacaacacccggggctggaactccgaactcaagccgcaaaccgaagacgtgcctgatggacatttgcatgcaacttatagcaatgacaactgtcatatcgatataacttgtaatgacacgcaatcctgcatgaatatacctaaatgctgtactcttatgtaatctcatgtaaaagcaataaaggcctcctcatcctcaaaacaaagatccgcctcccaatccccatttgagccaatggcagttcttggtctgtgctaacatgtacggccacaaggtggc

SEQ ID NO: 183 - DNA, 3787 bp, Ursus americanus parvovirus
  source 1..3787: mol_type = genomic DNA; note = Ursus americanus parvovirus - NC_077031
tactgctagtctgtaccagagaacaggacggcagagatttattagaagatgctatatgtttactagctaatcgttggcatattgaatttgaaatgaaacaccaagaaaatacgtggtatgcgtggggcaaacaggctagatttactgtaggtgattctaccattcaaagagcccttggtgatctcttttcacaggacttaatctcttttcaaaagggaccacctgacacgtcttttgacagcgctctacgctatcaaaaatgcaagcgcaaatggaacgtgccagacgtggtctctcttccctcagaagatactggtggggcgggaatacctgtcaccaactttctgaagaaacgcaagtaatgtctacagaaaatctaaaacaaactatgttaaattgggactctcgcatttggcaagcctgtgtattaggtatctgggatgctgtaccaattagagatcctaaaccatactgtttcctattagctactataccttctgtaaaaaaatggttaatatgtgttgaagacgatagtaatgaacaaacacacgtacatgttttagcgcttacctcccaacgttctgatgcttttaaacgaacattagatagaacctggaaacatgtagctatttcagctatggatgatatagaagaacccgatccaacattagaaatagtaaaatgtcaaaaatgccataaacctagcagtctattagcctatatgactaaagatccacattggatagcagctaatgatattgctactttaagtatatttgaagctatgtatgctcatgattggggacaaagatttagagaaaaacaactagctgaaaaaattaaaaaaactgaccctaccacttctaatatgcatatgatcacagcagaaatcactgaagtaatcatgcagcataactgcagatctattgaagattgtatgcgttccgcaccagatatcatagcaaaacatctccaccgtgcaggrttaggtaccataatacaaaactgcattagttgggtcactgccacaggtggagggtggtcacttccgagtattgggactaaatacaaagcatgtcccgaggctattcatacaactttattacatcaaggaattttaccaagtgactttgatcctactttctataaatggatcactaaacaaacattaaaacaaaataccctggttctctggggacccagcaacacaggaaaaagcgcttttatcagtggtttaaaaacatgcacaaattggggagaaatagtaaactcaaacacatttgcctttgagggtttaataaacacacaactaggagtctgggaagaaccactaatctcaccagaactagcagaaaaagcaaaacaaatatttgaaggtatggaaacctccatccctgtaaaatatagaaaaccaataaaattacctcgcattcctatcataatcactacaaatcacccaccctggcgtttttgcacaaaagaagaagaaatgtttcgtaaccgcatcctccagtgggaaacgtctcaaaatatgcaccacacatcctttatttgcagaactagtgaacatagctgcaaatgccgcatttgtcaaacaagtcgaagctgcgagactaattctagtggggaatcaactagcagcctgtcgcgagagaaacaatccttatcagaattggttcatgagcaatccccaacaggtaatgtttcaaccggatccatgtctatatctagagaaaaaacatcattatctacaacagaaaktagctggagcgaccacgacggatattgcagcagtacaacagggcagtcgttcgaacgcgccgacagcccaagacctagctgcagctccagcaccacaattagcgacagcatacgatccggtggggaacacagatccagccattcccgaacaggaatatcacacaccctcaccaggatccctgagtgtctggagtcccctatccctagaacagacaatgataatgatagcacaggaactcgaatgggaagcactacagacacagatagcacatcaagtgacacaaatcctactagacctagaagaaaacgcaaatctagccaaacactggtggtgttgggggaaacccaaaacaaaaaaacacgggattcgcttccaacctccagcacaaacatgggtggggatctgggcaccctaaacatacctacacgtcttgaatggtttatgtatttatctcatttacagaaacaatatggctgaagacgtatcctatcacaatacatacatggtatattggggaaatcaaccctacatctatccagctactaaaaatgcaccacctaatgcacacaccatgccagcaggaggaattaatactggatggcatatcatacctacaatcttatggaaacattttatcacaccaaaacaatgggtagaattcactattaaatatgaagcttacactgtaaaaggttactcatgcaccatctataatccaatacctatgacacaacaattagcaatacaaggcaccacagctttcacagcattcaataataccatctatactttaggagcacaagacgatctttatgaaactatatatcataactggtggagtgaaaccactacaggagactttagatattttaatctttcctataaagaaggacaatacaaaaacgtaaatggaacatggaaaaaaacgaaatggcctatctacacatggaacacagaaaatgcacgtaacaactcctcggccacatattcttaccttacggccatagacagttacagcagttggcctcgcgtgagagaacaagaagtcgtacccacaggagtcttctgggacccattaaacgacgccgacggcattttagaattaagaccaggaaaaaactctatgtccttctcatggcaacatcacccctgcgatgaaaataaatggtttaatatagatcaactggctaaatggtttccttataccgtcgataatccatatattcgttatcaaacatacggaccacccggctcatataaactcacaggagaagacgatcccgatcaattaacatccgatagctcatgggccagtttcagccaagtaaatgatcccaccatacccgatttactagaaatgcctatcgttcccatgcaatggttctggcaagaaatgcagaaatcaatagtcagtttaccagacattaaaaaaccccttctcaactgggcaggaacagaatacgaatgctataaatacggacctacacaatgcttcctaaagggcattcctctgtttgatgacaatgacacccatgtagccacaaccacacaaggatgtttccgaatcagcttacacctagcagccaaaaaaagacgaagcagaatctatgcacccacctggggacccttatcatggagacaatgttatgcaacagacacgccatacgtaccctctctcattcgataccgcaccggaggtgccagaagaacatggacaaacatcgacagaaatgcagaaggcatagaaaaatcccgtcactacagagaagacccttacgacaccacaaaaaccatccccaattcccaaacgaccacaactgtaactacagccaaaacacctccatccagcagcgccgcagcagccgcaggattatatcattcaccaaaagaacttcgacaaatccgccaaaaccgcggtgatgtagaaatgcaaacctaaataaaaagatcctgtgtcttacacaatcacatccacactatcctcctgtttcccactggaggataggggatggtacaatagtttag

SEQ ID NO: 184 - DNA, 4123 bp, Cachavirus 1A
  source 1..4123: mol_type = genomic DNA; note = Cachavirus 1A - NC_076028
ccaaacatggcaagctggtgggataatggtatgctatgcgtcaacgacttataacagagggtcgttggacatctacacgtcgtgaaattcgtgtgcctcctgctaaacaagcaaggttagacgattcttctcctgatacttctccatctatgcctgatttagaaagttctgacagtgatcctgaaggtatgtttgtgtttttttatagatgtctacacaagggtggtctggtccttctggatttactcttcttctttggagcgtcgatactcctcctgaatattctgaaaagaaggacatattattagatgctatttctttactatctggtcggtggggtctggaatttgaatttgttactaaaaataacgaattatatgcttatgctacttgttctaggttttctgtagcggagcgaaccgtagaaagagcattaggtgacttatttcctgcatatatcatttttcataagggtccggttacagcaaccgttgactcgttagttcgctttcaacaatgcaagcagaaatggaacgtggcggacgttctatcaccggaatcagacgattcacgtggtcgggagacaacctcattttggaaaaagaggaaaacattcaactagataaaaaccagctaacacatcaacttcatattatgaatgcccaaacatggcaagctggtgttctttctattacttatcctaatggttcatctcctctatctgatcctttaccttatgttaaatgttttgcatccttacgatctgtaaaagcttggatccttgcaggtgaatacaatcctgaaggaatatttcatgtacattcaatggcacttactttacaacgctctgattcatttagacgtagtattgatagagaatggtttataaaacgtgttgaatttttacagtcattttctgatagagatccagtacttgatgtattaaaaatgcaaaaatgtcacaaacctgaatctcttattgcatatatgtgtaaagaaccaatatggatttgtacttcagataaacattatacaaatattgtaaccgcagtatgctattatgatttaggagaacgctttcgtattaaacaacaagaaaaaattgaacgtgaacgagctaactctgctaatatgaataaaattgttgctgatgtattgaatgttatatatgatcactcatgtaaaactatagaagattgcatgaaatgtgcgcctgatataatgtctcaatatttacatagatctggattttcttctattgtacaaaactctggaggatatgtatctgctactgcacatggatggtcacttgaacgaattgcttgtaaacactttccacatcccgataacatacataaatgtttgttacatcaaggtttagatgtatgtacatttgatatatctttttttaaatggataactaaacaaatgtccaaacataacacattagttttatggggtcctagtaacactggcaaatctgcatttatttctggatttaaacaatgtgtttcttggggtgaaattgtaaatacaaataattttgcatttgaaggattaatgaataacaacattggagtatgggaagaacctttaattagtcctgaattagccgaaaaagcaaaacaaatatttgaaggaatggaatgttctattcctgttaaatttaaaaagcctataaaacttcccagaactccaattataatgacaaccaatcatgctccatggagattttgtactcatgaagaagaaatgtttagaaaccgcatgtttattttttattggaattttgatatggctaacactgaattaatctttaggaacagcaacgagagctgcgaatgctgtagctgcaaaagaagctgcggccgcgagacttctattgacatcgaaccaactagccgaatgcagggagaacaacaatccttacaattggctggggcaaccgacaatacaagctcagtttggcccagatccttgtctagaacaggaacgggcgcgttgggaggcggaacaacagctgaatcaacaaattgcaggggcgacaaccaacgatattgcagcaatacaggcagggcagaggagcaatgctcccacagctcaggatctagcatcagctcctgcacctcagttagcgacgggatacgaaccagtgggtataacagatccagcgatccctctttcggaatttcaggtacccagtccggggatgttatcgatgtggtctccaataagtatagacgagacgatggaattgattttagacgagatagaatgggaagcaatggaaatggagatcagacagaaagttatagtgatactggacgggctagtagacaatatgcatcagagtcagaaatggtggtgttggggaaaaggaaaaaaaccattgaaactgaaattcaagccaaaaaattcagcatggataggaaaatggagtccttaagtatacctactaaacttgattggtttatgtatctttcttatttacaacagcaatatggctgaagatgtatcttttaacaatacttatatggcttactggaataatatgccgtatgtatatcctaataatacgcttgctactattgttgctgctgaaactggtggaaatgcaataaatactggatggcatatcttacctacaatgcagtggcgtcattttattacccctaaacaatggataacgatgaatattaactatgaagcataccatgttaaaggatactctgtaaccgtatataatccagtacctatgacacaacaattagcaattcaaggaacaactgcatttactgcatttaataatactatatacacattaggtgcacaagatgatctatacgaaactaattggtttaattggtggaaagattcttctatgaaagatttttcaattgcctataaagaaggtatgtttaaatctggaagcgacggtacaactcaaaaacgaaccattttaccaatatattcatgggaaccacataacgcaacaactgttgacgatcacacgttttcagttgatttaacatctagtggatcggctgtatggcccgctcctgattccagcagcaggcctcgaagacccactggatgtttttgggatcctttaaatgatccatcttctataatggaacttcgtccaggaaaaaattcaatgacatggtcatggaatgttcatccagctgatgaaaatcgctggtttaattttgaccaaattgctaaatgggcaccatatgtacatgataatccatttttaaaatacaacatggctggaggtactggttcttatgttgttgctccacaagatgacccatataaacttgcaacagacagcaattgtaattctgatctcgcatctgataaaaaatgtgattatacaattcctgacttaagctttttaccaattgttcccatgagttggttttggcatgaaataaataaatcaattgcagcatctgatgttatgcgaacgtactcatggcgttttgatggaacagaatacgaacaatataaatatccacctactcaatgttttattaaaggattacctttatttgatgataacaatacacatatacctaccacaacacaaggatgttttcaagtaactctacatcttgcttgcaaaaaaagaagaagccgatactacgcaccaacatggggaccatggacttggaaagatatatatggcattggctcagatacgagaatgtattccaattacattagatatagaacaggtggagcgagacgaacatggaccaacgtagacaaaaacaatacaacgctaagtcagctaacaaaatttagagaaacaccctttggaacaacaccatattcaagaaatacaacatcatcaattactgcaccaataaaagaactcgttaacctaattaaacgccataaaaaaacaaaggaacctgaaatgattgaaatgcaagaattacaccatacagatgatgaagaaattgaagtaataactgcagacgaagcaactgaattaatggaatagtaactgtgtctacacattccacatccacaccgcgatgacctaattctttacatacccccctcccacatcgatattatcagtgggtactgtactggcgcctgtgtatcc

SEQ ID NO: 185 - DNA, 3661 bp, Chicken chapparvovirus HK
  source 1..3661: mol_type = genomic DNA; note = Chicken chapparvovirus HK - NC_075989
tctggaaaagcaaatgtaggtataagtaacgataaagggggcggggcaggggggtaccgcccataatattgatgtgtgtgtgtggatgtggtgtaagacacagagactataaatatgagcaagaagtacaatcagtggtacgctatgcgtaaaaatttacaggataaaggtaaatggaaaggagcagcgcataaagttcctgctagagaagaaggagaacctgaaccgaagaatcctaaattcggtgatcctctggaaaatcaggaagcagctgtacaagaaggtgctacacctgatccagaagaaggaaccagtaaaactgcacaaggtatgttattaatatgacatattttgcagattcattatggcaggattcggtgcatcaaatggattcacattgctggtatgggtcgatcccgactcctggagacttacaaatatggaagatcagcaacgctataacaagaagaaagagattttggaagacgttattaccttattatgtggaagatgggggatggagggtacctttatggagcatagcggggatttatacgcattcttctgttgtaccaaatttgtggttagcacagcgaccttggttagggctgtaggagatttaggttcctgtgttaaatttcatagaggtggttctgctgataaaccagaatttcttattagatatcgtgaatgtctgcgcaagtacaatgtggcagaaaaagtgtccgacgccttctctggaggggaatacgcggagaatgctgtgggcaccagttggaatgccaacaagagacagagggcgaaatagtagaagaaaaagatttcgttgccagagtcatgccaatcatcgaagtggaagaaaatttaatgaatatgcggacatatctcggtggtgttgttattatagcagatgaagatggacaaatcattgaaaatcctgtactgtatggaaatttgttaaataacatggcatgtaatgatgattggattgcaattagtgaatacaataaaaacaatgtgtttcatgttcacacaatgtgtaaaactggtgttcgatcagattcatttcgaagaactgctaatactgtttgggaaacaattaaaaaagatccaacaatcattgaacattatggacaatgttcattggacatgatgaagtgtcaaaaagctcatagaccttcatcattgcttcaatatatgtgtaaaaaaccaatatggattttatcgaacacagaaaaattactgcaaatgtcatatgacattgaactttgggatttgggctcgagattcaaaagtccagcaaatgatcaaacagtgtcagtagataacgctaatccaatgatacaagagcttttagaatgtattatgcaacacaattgtaaaacatttgaagatgtagttaaaaaaggggcggacgttgttctcaaatatttacatagaccaggattctctagtgtagtacaaaattgcttggtttacgcgaagtgcgttggtcatacatggtcgttgtcgaattatggaaaagtggttcctgatcctagtggtatccactgcattctcattactcaaggaattaacccagatgattttgatcctattttttggcaatggatcacaaagaagcatctcaaacgaaacacaatccatgtctttggaccgtcaaacacgggtaaatcgtgttttctcacaggactaggtaagtgctgtccaggcggagaaattgttaatggcaataattttaattttgaaggaatgattgatgtttattgggcaaaatgggaagaaccattatgtgctccagaattagcagagaaatttaaacaaattgcagaaggcatggaaacatttattcctgtgaaattcaaacgaccatatatgttaccacgcacacctgtctggattactactaatagtatgatttgggattggtgtccgaatcaagaaggaccattcagaaatcgtatgtggttttttgaattcacatatgacatgtctaatggtctttttgttcctagaatctctcaatcaagctgcaaatgccgctattgcagccaatgtgggagcgggccgtctacttctggcctcacaacagctaagagagtgcagagaagcaaacaatccgtacaaaaacagctggatgccaggcctggcaccagcaaatctgcaatgggcaccggatccatgtgcagaacaggaggaagcattgcaaaatctgatgaagcagggagcagcggaggggaatcaagtagcaacacaacaattggggggagcaccagcaccacagttagcagaatcgacggatccgacacccaacacggatccagcaataccaatgaacgaatatgtagttccgacacagggagcacagaatcagtggagcccgatagttccagaggatgtgatggatatgattctagaaaactatccggaggatgcagaacctccggaggagatgatgttagacgagattctagaacacatgttttattacataatgtggtgtccgtggggtcagccaggcacaaaaaacgcaaaatggaagctggtttacaaaccgatcaacagtcagtgggtgggcaattggacaccaagataaaaattcctgataaagatgaatggtctaaatatcttgcttatatctttcatagatttgaaaagcaatcatctactgatttaactgcatacgaagatctatcatctgattcagaatgactgaaactattgctttcgataatgtctatatgacatacatagacaataatccttatcactatcctagcatcgatgtcttaaatatgattcaaggtgatacatttgaagcactagaagttaatactggatggcatttgattccgaactttttatggagacatgtaattattccaagacaatgggatgctctcattcgtaattgtgaagcgtatactgtaaaatcaataaaaggacaaattttcaatccaataccaatcacacataatatctctttacaacgcacgagcttgttttctgcattcaacaattgcacatatgctatgacatacactgatgacaaatatgaaactgattggtttgcctggaattcactcttaccagaaaaacaattacatttatcacaacgtgaaggacttgtatggacaggaacacaacaaaatgcacaaaatcatgttcctaaacgctaccaatggccaatatattcatggaacaaaccaatatgcagaacaatatttccatctgtatggagtcaaggaaaagatggatctgcaggtgtatatgacacacaatataccaacatcacacaatcagcaacaacaactataaaagaagcaattcctaatggagtcttctgggatccattaaattgctctaatgaaattggtgaattgcgtgcaggaaaaaatagtattgaatttagttggcatgttgcaagttgcgatgaaggtaaatttttcaatactgattggatcgcagcatttgcaacatggacagtcgatggtccatatcaatcagaaggtcgaccatggacattatggcgaacaaatgatatggatccaggaaatttcagtacattcggacttgcaatgtcgcaaggcgattcaacatctggaaatcaaccacaaaatttccaagactacactgtaccaaacatgttcaacatgccaat

SEQ ID NO: 186 - DNA, 3539 bp, Turkey parvovirus 2
  source 1..3539: mol_type = genomic DNA; note = Turkey parvovirus 2 - NC_075985
gaagtgctcctgattttaatgctgaggaattgattaagtacaaaaactgtaaggagagatgggaagtcccagacacagtgacggaagcttcttcctatggatgggatcagcaggaacagcacgggacatcagccctgaacaagcggaaacgtacttagttgctaaagactatgtcgcttcgccacttcctgaagttgaaaaacttctcaaactactcaacatgacggaatggcaagcaggcctcgagcggatctctgaccagacaggaaatcctaccgtagatcctatagcttatgcgttaatcttcaatgatgtttctgttgttaatgattgggtggctactggggaatttaatgatgatgagatttttcatgttcatgttatgtttaaaacatcagctagaaccgattcatgtagactttctattaagttagcactcgataggttacatactactgataattggatgaatggatttggacaaaaatggacctgtgatttgttgaaattacaaaaatgtcataagcctgaaggattgttagaatatatgatgaagggaccattatgggtttgttctaatcatgaccgttatctacaattatgttatgatattgatacatggaatttgaatgaacgatttaaacagaaaaaacagaaatcacaaccagaattaaatgagattaccagagtcttattagacattattgttcagcacaattgtaaaacattaactgatattatgaaagctgcaccagaagaaattgtgcaatatttgcatagacctggattagttcaaattgttaataattgcctttcctatgtagttgctactaaaggagcttggcaattaagcatttatgaaaaacatgatcctgatcctgaagttatacacagagtattattacaccaaggaatacaaccatccatgtttgataaaatctttcatacatggattaccaaacaggatcctaaacgaaatactatcatgatcttaggaccatctaatacagggaaatcatgtttcatcaaaggccttaaatatgctgtaccatggggagaaatagtcaataccaactctggatttggttttgagggaattttagacagtgtcataggttgttgggaagaacccttactcagcagtgaccaagcagaaaaagccaaacaagtactagaaggaatgagctgtagtattcctgtcaaatataagaaacctcaattattagaacgtacacctatcataattacctctaatcaccatttatggcgttactgctcatctgaagaaacagctctcatgaatagaatgtggttatttgaattcaatcataatatgcgtgattctgtttatgtttgtagaactagtgaatatagctgccaatgccgtcattgcacagcaagccgcagctgctcgtctcctcatggcgagtcaagcgctggccgagtgcagagagcaaaacaacccctacctaccggggaacagtctatttggtccgacccgagcacaaatgtggggaccggacccatgcgagcaacaggaacaggacctagcttcagccacagcggatcatcaagcttccgtccaattagcccaaaagagctcagctccgacaccgcaggacatacaatctgcaccccaaccccaattgtccagcacctggagcacagagtacgatccatcgattccactgacagagttcctagtaccatcaccagcattgatgtcagaatggagtccgacaagtctacaggaagttttagacatgttagccatcgagatggaagacatctcctcaggcagctcgacctcgagcgaggttcaggaagccatggaagtagtacaggagaacatgatgtgctttctcctatgggatccatgggacataccacccaaaaaaagaaaaagataccgattccagccaaaaaacgcaagctggatagggaagtgggttccagaataacactaatacctctttctgttcccaccaaacaggactgggaagaatacctctcctggttatatcactactatggctgacgatatatcatttagtcattcatacatgtgttacattaaaaaccaaccatatctgtacccaacacagaaaaatccaactatgccacaagagagtactttaaatactggatggcatattatacctactacactatggaaacatttctgtacacctgctgattgggttgatttgattactcattatgaagcgtattctgttacgggatattctgtatctatctttaacatgacaccaatgactactcaaatcgctattcaaggtactaataccttcactgcttttaataatacaatatatgctcttggatacactgatgaaatgtgtgagactggtttttttaattggtactccagtgaatatgattcacctaacctttcattacatgaaggcttaggtaaaaggcatgatgacacatcctacagatatgaactacctatatacctatggcctaaacctcatgtacgagtaacttcacaaagaactatgggagattggccatataacactgaaggatacacaacatggcctaaaaaccaacagaacaatgatgacactaatggcattccaacaggcctaatctgggatccattcaacatgcctaaaatgttacaagaattgagaccaggcaaaaatgccatatctttctcatggcatccacatgattgtgaccaaaacaaatggtacaatttggatcaaattgcatggtggtggccatatgcagcaccatcaccttatccaaacaataacagacctcaaacaagtcaactatccacacaatgtgatccagatagattacagagcaaatatgaaaacactaatccaggtgactataccatgcctgatatgtctcttatgccaattacacccacaggatggtggtggaaagaaatgcaatcatccatcattctatcacctggtgaatacttctcatctagacctgatctgttcttcgcaggaacagaatatgaattctttaaatatcctacaatgcaacatttcatcaaaatcattccactatttgattcacaaggcaatcacattgacatttcagctaacatttccgtccgaacaactctacacttgaaatgcaagaaaagacgctctgcatatttctgtcctacatacggaccattaaattggagaatgttatacactaatcaaccaaacagattcaatttcagacattcatatgttcgttatagaactgctggtgcacgccttacatggcaaaaccaagcaggcactgaagaaaccaatccagcctcaacaattgatgtcagtcatccaagaacatctccgtacattgcttcctctactaacaccagaatgactactactttcatgacattagaaccacgcatgtcaccagtagtcacatatgacaaagaatctggagaagccaccatccgagaaccaccgattgctacacacaggaaagccagaagaccaccaaacatcccgtgttccacagaagaagcaatgctcatctcactcgaccaa

SEQ ID NO: 187 - DNA, 4857 bp, Adeno-associated virus
  source 1..4857: mol_type = genomic DNA; note = Adeno-associated virus - NC_040671
gtcatactttctcacaataagcttgtcctcctccccccaataacacgctcgctcgctcgctcgggacaaccgggcgaagcccggttgcaagcgcccttcgggcgcttgtcccgagcgagcgagcgagcgtgttattggggggaggaggacaagcttattgtgagaaagtatgaccaaagtacgtaggccagataccgtaggggttacacaaccaggttgtaacacttgggtgtctgggttcgatttccagtctggccgtgtagggagggcgtgattcttcatcaaagtggtgggtggagaatctgacccttcttttttctcgcgagactttgcgagatttccaaatatcgcgagaccttaacagtataaagtgagcgcgagcgagcgaccgcgccagacgccatcacgccgttgatccctacacaccaagatgacgacacctacgtactacgagctgattgtggagctgccgagcgacattgacactcaactccccctggtcagcgacagctttgtgcgatgggtgacgagcaagacgtgggaaccccccctggacagcaaatgggacatggaccaagtggaccaagtccagctgactctcggagacaagattcaacgggaaattttaaaacagtggaggaccattaccggagaccctgatccgaaatattacgtccagctggagcaaggagagacgtactttcacctgcacacgttgctgcagtgctgcaacattaagccgttggtcctcggaagatatgtcaaacagattgagaaaaagctggtgagtaccgtctacggggggcacaatcctctgatcgacaattggctccgaattaccaagacaaaatcgatcgggggctccaataaaattcgcgcgcaaagctacattcccgcctatctcattcccaaaaaacaaccggaagttcagtgggcgtggacaaatatcgaggagtatataaaggccgttttaaactctgaattgcgtcatcaaattggagaagcgcatttccaggagcaaggcctcgctctgcgcgacagcaccaacctatcgagaaactctgagggggctcccatcatcgtcagcaagtgcaccaagaaatacatggagctcgtcgagtggctggtcgagaagggcatcacgaccgagaagcaatggctcttggaaaacaaggagagctttcgctccttccaggcctcgagcaactcggctcgccaaatcaaggcggcccttcagggcgccactcaggaaatgctcctcaccaagacggcgtcagactacctgattggcaaagaccccatcggagacatgaccgacaaccgaatctacaaaattttggaaatgaacggctacgaccctctctacgtggccaacctgtttgtaggttggtgtcagatgaagtttggaaaacgaaacacaatctggctgtttggacctgcgaccacgggcaagaccaacattgcggaggctattgcccatgctgtgcccttttatggatgcgtcaactggaccaacgaaaactttcccttcaacgactgcctggaaaagatgatcatttggtgggaagaggggaaaatgacggccaagattgtagagacggctaaagccatcctcgggggatccaaggttcgcgtcgaccaaaagtgcaagtcttcgatgcagctggaacctacgccggtcatcattaccagcaacaccaacatgtgttatgtcgtggatggaaacacgaccacctttgagcacgctcaacccctacaggaccgaatgtttaagctggaactcttgaagcgacttcccgacgactttggaaaagtgaccaaaaaggaagtcagagactttttcgcgtggggggctaaacataccgtagaggtcgattcttgctttttagtaagaaaggcggagtctcgtaaaagacacgccccggaagtggcatcagaggataaaagccctcccgctaaggcggctcgcacagacgagcttcagcatttgagcggcgaggagggaacctctgtctctgccaggtatgttttgaaatgcgctaaacatttggggatggtaaccatgatgtggccatgtagagattgtgaaaaggccaattgtaatataaatcagtgcattttgcataaaagtttgtcttgtaaagagtgttttccagattatgattccgatgtatctgttcaggaaggcgagccttccggcaacccccccttgtcgagctccgacgaggacattccctctcaccaacccccccttgtcaaagattgtaaaccctggactccgtgttcctatcaccacctgaccggggtagccaatagaaattgtagcatgtgcaaattgagaaatgtggatttggatgattgtgacagtgagcaataaaatgacttaaactagacatgtctgctgctgattctgttccagattggttggagaattttgtgcgcaagcacattgtcaatccggttgccgaatttgctcatttggaggctggagccccacaaccaaagcctaaccagcagcatcaagatcgaggcggaaccaaggacgatagccgaggtcttgttttacctggctacaagtatcttggtccttttaacggtcttgacaagggtgaacccgtcaacgctgctgacgctgctgcgctcgagcacgacaaggcgtacgaccagcagctgcaagcgggagacaacccctatctgaaatataaccacgcagacgccgaatttcaagaggccctaaaggacgacacatcctttgggggaaatctcggtaaagcggtattccaggccaaaaagagggttctcgaaccctttggcttggctgaagacggaaagacggctcctaccaacgaacgtcgaaaggagaatatagacgactactatcccaagaggaaaaaagccaaggcgggagaagaaaagcccccttctaccgacgcagtagaaggagctggagacggagaaccaagcacatctaccggaggggaaacccccagcggtactcaatctaatacaatgtctgcagggggcggcgcaccaatgggcgatgaccaacagggtgccgatggagtgggtaattcctcgggaaattggcattgcgattccacatggctggacaatcttgtcatcaccaagtccacccgaacctgggtcctgcccagctacaacaaccacatctacaagcgagtctccaacacgggaggagacaactcgtactttggattcagcaccccgtggggatactttgactttaaccgattccactgccacttttcaccgcgagactggcaacggctcatcaacaacaactggggaatccgacccaaggccctcaagtttaagctcttcaacatccaagtcaaagaggtcacgactcaagactcgaccaagaccgtcgccaataacctcaccagcactattcaagtctttgcggactcggaatatcagctaccgtatgtagtgggcaacgcgtccgagggatgcctgcctccctttcccgcggacgtctttgtgctgccgcagtacggatacctgactttggacaataacggaaactctgtcgacagaagcgccttttactgtctcgagtactttccgagtcagatgctgagaacgggcaacaattttgaatttacctacgaatttgaaaaggtgccgttccacagcatgtttgctcacaaccagtcgctgagtcggctaatgaatccgttggtggaccagtacttgtactactttagcaacgtctcggggcctaacaacgctgcccagattcgttacgacaagggtcgtaaggaagacattgccggccaatgcagaaattggctccccggaccattttggcaaaatcagagcgtgcgtctggacaatgccaacaacaatcccaagtgggattactgggcaaactcgaatcgagtaaggctggacggcaaattgtactccgtcaaccctggaattcctcaagccacagaagctacgcagaatccctacaaccagtatccgacgcagtcgactctggtgtttgaaaagaagcccggaggaaaccccaccggagtagatccaaacaatctcaaccttaccaaggatgaagaaattagaaccaccaatcccgtggcctatgccgtgtcaggaacagtcaccggaacgtcggccatcaatcaaaacaatggagccagtcagactcctacggcttccgacgtggacattttgggagccatgcccggaatggtgtggcaaaatagagacatttatctgcaagggcccatttgggccaagattccctccacagacaatcattttcatccttgtcctctcatgggaggattcggattcaagcatccgcctccgcagattctcatcaaaaacacaccggtgccgtcagaccctgcgggattttcagcgaccaagttcaactcgttcatcactcagtattccaccggacaagtcaccgtggaaatcatgtgggaactacaaaaggaaacgtccaagaggtggaatccagaaattcagtttacgtccaatttcaacgccacccaagaactgcagtttgcacccaacgtgtctggagactacgaagaacccagagccatcggctcgagatatctcaccaaacctctgtaacttgtatttattcattgtttgtatcatttattcaataaaccgtttattcgtttcagtttcaattcgactcgcgtcatactttctcacaataagcttgtcctcctccccccaataacacgctcgctcgctcgctcgggacaagcgcccgaagggcgcttgcaaccgggcttcgcccggttgtcccgagcgagcgagcgagcgtgttattggggggaggaggacaagcttattgtgagaaagtatgac

SEQ ID NO: 188 - DNA, 4718 bp, Adeno-associated virus 1
  source 1..4718: mol_type = genomic DNA; note = Adeno-associated virus 1 / Dependoparvovirus primate 1 - NC_002077
ttgcccactccctctctgcgcgctcgctcgctcggtggggcctgcggaccaaaggtccgcagacggcagagctctgctctgccggccccaccgagcgagcgagcgcgcagagagggagtgggcaactccatcactaggggtaatcgcgaagcgcctcccacgctgccgcgtcagcgctgacgtaaattacgtcataggggagtggtcctgtattagctgtcacgtgagtgcttttgcgacattttgcgacaccacgtggccatttagggtatatatggccgagtgagcgagcaggatctccattttgaccgcgaaatttgaacgagcagcagccatgccgggcttctacgagatcgtgatcaaggtgccgagcgacctggacgagcacctgccgggcatttctgactcgtttgtgagctgggtggccgagaaggaatgggagctgcccccggattctgacatggatctgaatctgattgagcaggcacccctgaccgtggccgagaagctgcagcgcgacttcctggtccaatggcgccgcgtgagtaaggccccggaggccctcttctttgttcagttcgagaagggcgagtcctacttccacctccatattctggtggagaccacgggggtcaaatccatggtgctgggccgcttcctgagtcagattagggacaagctggtgcagaccatctaccgcgggatcgagccgaccctgcccaactggttcgcggtgaccaagacgcgtaatggcgccggaggggggaacaaggtggtggacgagtgctacatccccaactacctcctgcccaagactcagcccgagctgcagtgggcgtggactaacatggaggagtatataagcgcctgtttgaacctggccgagcgcaaacggctcgtggcgcagcacctgacccacgtcagccagacccaggagcagaacaaggagaatctgaaccccaattctgacgcgcctgtcatccggtcaaaaacctccgcgcgctacatggagctggtcgggtggctggtggaccggggcatcacctccgagaagcagtggatccaggaggaccaggcctcgtacatctccttcaacgccgcttccaactcgcggtcccagatcaaggccgctctggacaatgccggcaagatcatggcgctgaccaaatccgcgcccgactacctggtaggccccgctccgcccgcggacattaaaaccaaccgcatctaccgcatcctggagctgaacggctacgaacctgcctacgccggctccgtctttctcggctgggcccagaaaaggttcgggaagcgcaacaccatctggctgtttgggccggccaccacgggcaagaccaacatcgcggaagccatcgcccacgccgtgcccttctacggctgcgtcaactggaccaatgagaactttcccttcaatgattgcgtcgacaagatggtgatctggtgggaggagggcaagatgacggccaaggtcgtggagtccgccaaggccattctcggcggcagcaaggtgcgcgtggaccaaaagtgcaagtcgtccgcccagatcgaccccacccccgtgatcgtcacctccaacaccaacatgtgcgccgtgattgacgggaacagcaccaccttcgagcaccagcagccgttgcaggaccggatgttcaaatttgaactcacccgccgtctggagcatgactttggcaaggtgacaaagcaggaagtcaaagagttcttccgctgggcgcaggatcacgtgaccgaggtggcgcatgagttctacgtcagaaagggtggagccaacaaaagacccgcccccgatgacgcggataaaagcgagcccaagcgggcctgcccctcagtcgcggatccatcgacgtcagacgcggaaggagctccggtggactttgccgacaggtaccaaaacaaatgttctcgtcacgcgggcatgcttcagatgctgtttccctgcaagacatgcgagagaatgaatcagaatttcaacatttgcttcacgcacgggacgagagactgttcagagtgcttccccggcgtgtcagaatctcaaccggtcgtcagaaagaggacgtatcggaaactctgtgccattcatcatctgctggggcgggctcccgagattgcttgctcggcctgcgatctggtcaacgtggacctggatgactgtgtttctgagcaataaatgacttaaaccaggtatggctgccgatggttatcttccagattggctcgaggacaacctctctgagggcattcgcgagtggtgggacttgaaacctggagccccgaagcccaaagccaaccagcaaaagcaggacgacggccggggtctggtgcttcctggctacaagtacctcggacccttcaacggactcgacaagggggagcccgtcaacgcggcggacgcagcggccctcgagcacgacaaggcctacgaccagcagctcaaagcgggtgacaatccgtacctgcggtataaccacgccgacgccgagtttcaggagcgtctgcaagaagatacgtcttttgggggcaacctcgggcgagcagtcttccaggccaagaagcgggttctcgaacctctcggtctggttgaggaaggcgctaagacggctcctggaaagaaacgtccggtagagcagtcgccacaagagccagactcctcctcgggcatcggcaagacaggccagcagcccgctaaaaagagactcaattttggtcagactggcgactcagagtcagtccccgatccacaacctctcggagaacctccagcaacccccgctgctgtgggacctactacaatggcttcaggcggtggcgcaccaatggcagacaataacgaaggcgccgacggagtgggtaatgcctcaggaaattggcattgcgattccacatggctgggcgacagagtcatcaccaccagcacccgcacctgggccttgcccacctacaataaccacctctacaagcaaatctccagtgcttcaacgggggccagcaacgacaaccactacttcggctacagcaccccctgggggtattttgatttcaacagattccactgccacttttcaccacgtgactggcagcgactcatcaacaacaattggggattccggcccaagagactcaacttcaaactcttcaacatccaagtcaaggaggtcacgacgaatgatggcgtcacaaccatcgctaataaccttaccagcacggttcaagtcttctcggactcggagtaccagcttccgtacgtcctcggctctgcgcaccagggctgcctccctccgttcccggcggacgtgttcatgattccgcaatacggctacctgacgctcaacaatggcagccaagccgtgggacgttcatccttttactgcctggaatatttcccttctcagatgctgagaacgggcaacaactttaccttcagctacacctttgaggaagtgcctttccacagcagctacgcgcacagccagagcctggaccggctgatgaatcctctcatcgaccaatacctgtattacctgaacagaactcaaaatcagtccggaagtgcccaaaacaaggacttgctgtttagccgtgggtctccagctggcatgtctgttcagcccaaaaactggctacctggaccctgttatcggcagcagcgcgtttctaaaacaaaaacagacaacaacaacagcaattttacctggactggtgcttcaaaatataacctcaatgggcgtgaatccatcatcaaccctggcactgctatggcctcacacaaagacgacgaagacaagttctttcccatgagcggtgtcatgatttttggaaaagagagcgccggagcttcaaacactgcattggacaatgtcatgattacagacgaagaggaaattaaagccactaaccctgtggccaccgaaagatttgggaccgtggcagtcaatttccagagcagcagcacagaccctgcgaccggagatgtgcatgctatgggagcattacctggcatggtgtggcaagatagagacgtgtacctgcagggtcccatttgggccaaaattcctcacacagatggacactttcacccgtctcctcttatgggcggctttggactcaagaacccgcctcctcagatcctcatcaaaaacacgcctgttcctgcgaatcctccggcggagttttcagctacaaagtttgcttcattcatcacccaatactccacaggacaagtgagtgtggaaattgaatgggagctgcagaaagaaaacagcaagcgctggaatcccgaagtgcagtacacatccaattatgcaaaatctgccaacgttgattttactgtggacaacaatggactttatactgagcctcgccccattggcacccgttaccttacccgtcccctgtaattacgtgttaatcaataaaccggttgattcgtttcagttgaactttggtctcctgtccttcttatcttatcggttaccatggttatagcttacacattaactgcttggttgcgcttcgcgataaaagacttacgtcatcgggttacccctagtgatggagttgcccactccctctctgcgcgctcgctcgctcggtggggcctgcggaccaaaggtccgcagacggcagagctctgctctgccggccccaccgagcgagcgagcgcgcagagagggagtgggcaa

SEQ ID NO: 189 - DNA, 4726 bp, Adeno-associated virus 3
  source 1..4726: mol_type = genomic DNA; note = Adeno-associated virus 3 / Dependoparvovirus primate 1 - NC_001729
ttggccactccctctatgcgcactcgctcgctcggtggggcctggcgaccaaaggtcgccagacggacgtgctttgcacgtccggccccaccgagcgagcgagtgcgcatagagggagtggccaactccatcactagaggtatggcagtgacgtaacgcgaagcgcgcgaagcgagaccacgcctaccagctgcgtcagcagtcaggtgacccttttgcgacagtttgcgacaccacgtggccgctgagggtatatattctcgagtgagcgaaccaggagctccattttgaccgcgaaatttgaacgagcagcagccatgccggggttctacgagattgtcctgaaggtcccgagtgacctggacgagcgcctgccgggcatttctaactcgtttgttaactgggtggccgagaaggaatgggacgtgccgccggattctgacatggatccgaatctgattgagcaggcacccctgaccgtggccgaaaagcttcagcgcgagttcctggtggagtggcgccgcgtgagtaaggccccggaggccctcttttttgtccagttcgaaaagggggagacctacttccacctgcacgtgctgattgagaccatcggggtcaaatccatggtggtcggccgctacgtgagccagattaaagagaagctggtgacccgcatctaccgcggggtcgagccgcagcttccgaactggttcgcggtgaccaaaacgcgaaatggcgccgggggcgggaacaaggtggtggacgactgctacatccccaactacctgctccccaagacccagcccgagctccagtgggcgtggactaacatggaccagtatttaagcgcctgtttgaatctcgcggagcgtaaacggctggtggcgcagcatctgacgcacgtgtcgcagacgcaggagcagaacaaagagaatcagaaccccaattctgacgcgccggtcatcaggtcaaaaacctcagccaggtacatggagctggtcgggtggctggtggaccgcgggatcacgtcagaaaagcaatggattcaggaggaccaggcctcgtacatctccttcaacgccgcctccaactcgcggtcccagatcaaggccgcgctggacaatgcctccaagatcatgagcctgacaaagacggctccggactacctggtgggcagcaacccgccggaggacattaccaaaaatcggatctaccaaatcctggagctgaacgggtacgatccgcagtacgcggcctccgtcttcctgggctgggcgcaaaagaagttcgggaagaggaacaccatctggctctttgggccggccacgacgggtaaaaccaacatcgcggaagccatcgcccacgccgtgcccttctacggctgcgtaaactggaccaatgagaactttcccttcaacgattgcgtcgacaagatggtgatctggtgggaggagggcaagatgacggccaaggtcgtggagagcgccaaggccattctgggcggaagcaaggtgcgcgtggaccaaaagtgcaagtcatcggcccagatcgaacccactcccgtgatcgtcacctccaacaccaacatgtgcgccgtgattgacgggaacagcaccaccttcgagcatcagcagccgctgcaggaccggatgtttgaatttgaacttacccgccgtttggaccatgactttgggaaggtcaccaaacaggaagtaaaggactttttccggtgggcttccgatcacgtgactgacgtggctcatgagttctacgtcagaaagggtggagctaagaaacgccccgcctccaatgacgcggatgtaagcgagccaaaacgggagtgcacgtcacttgcgcagccgacaacgtcagacgcggaagcaccggcggactacgcggacaggtaccaaaacaaatgttctcgtcacgtgggcatgaatctgatgctttttccctgtaaaacatgcgagagaatgaatcaaatttccaatgtctgttttacgcatggtcaaagagactgtggggaatgcttccctggaatgtcagaatctcaacccgtttctgtcgtcaaaaagaagacttatcagaaactgtgtccaattcatcatatcctgggaagggcacccgagattgcctgttcggcctgcgatttggccaatgtggacttggatgactgtgtttctgagcaataaatgacttaaaccaggtatggctgctgacggttatcttccagattggctcgaggacaacctttctgaaggcattcgtgagtggtgggctctgaaacctggagtccctcaacccaaagcgaaccaacaacaccaggacaaccgtcggggtcttgtgcttccgggttacaaatacctcggacccggtaacggactcgacaaaggagagccggtcaacgaggcggacgcggcagccctcgaacacgacaaagcttacgaccagcagctcaaggccggtgacaacccgtacctcaagtacaaccacgccgacgccgagtttcaggagcgtcttcaagaagatacgtcttttgggggcaaccttggcagagcagtcttccaggccaaaaagaggatccttgagcctcttggtctggttgaggaagcagctaaaacggctcctggaaagaagggggctgtagatcagtctcctcaggaaccggactcatcatctggtgttggcaaatcgggcaaacagcctgccagaaaaagactaaatttcggtcagactggagactcagagtcagtcccagaccctcaacctctcggagaaccaccagcagcccccacaagtttgggatctaatacaatggcttcaggcggtggcgcaccaatggcagacaataacgagggtgccgatggagtgggtaattcctcaggaaattggcattgcgattcccaatggctgggcgacagagtcatcaccaccagcaccagaacctgggccctgcccacttacaacaaccatctctacaagcaaatctccagccaatcaggagcttcaaacgacaaccactactttggctacagcaccccttgggggtattttgactttaacagattccactgccacttctcaccacgtgactggcagcgactcattaacaacaactggggattccggcccaagaaactcagcttcaagctcttcaacatccaagttagaggggtcacgcagaacgatggcacgacgactattgccaataaccttaccagcacggttcaagtgtttacggactcggagtatcagctcccgtacgtgctcgggtcggcgcaccaaggctgtctcccgccgtttccagcggacgtcttcatggtccctcagtatggatacctcaccctgaacaacggaagtcaagcggtgggacgctcatccttttactgcctggagtacttcccttcgcagatgctaaggactggaaataacttccaattcagctataccttcgaggatgtaccttttcacagcagctacgctcacagccagagtttggatcgcttgatgaatcctcttattgatcagtatctgtactacctgaacagaacgcaaggaacaacctctggaacaaccaaccaatcacggctgctttttagccaggctgggcctcagtctatgtctttgcaggccagaaattggctacctgggccctgctaccggcaacagagactttcaaagactgctaacgacaacaacaacagtaactttccttggacagcggccagcaaatatcatctcaatggccgcgactcgctggtgaatccaggaccagctatggccagtcacaaggacgatgaagaaaaatttttccctatgcacggcaatctaatatttggcaaagaagggacaacggcaagtaacgcagaattagataatgtaatgattacggatgaagaagagattcgtaccaccaatcctgtggcaacagagcagtatggaactgtggcaaataacttgcagagctcaaatacagctcccacgactggaactgtcaatcatcagggggccttacctggcatggtgtggcaagatcgtgacgtgtaccttcaaggacctatctgggcaaagattcctcacacggatggacactttcatccttctcctctgatgggaggctttggactgaaacatccgcctcctcaaatcatgatcaaaaatactccggtaccggcaaatcctccgacgactttcagcccggccaagtttgcttcatttatcactcagtactccactggacaggtcagcgtggaaattgagtgggagctacagaaagaaaacagcaaacgttggaatccagagattcagtacacttccaactacaacaagtctgttaatgtggactttactgtagacactaatggtgtttatagtgaacctcgccctattggaacccggtatctcacacgaaacttgtgaatcctggttaatcaataaaccgtttaattcgtttcagttgaactttggctcttgtgcacttctttatctttatcttgtttccatggctactgcgtagataagcagcggcctgcggcgcttgcgcttcgcggtttacaactgctggttaatatttaactctcgccatacctctagtgatggagttggccactccctctatgcgcactcgctcgctcggtggggcctggcgaccaaaggtcgccagacggacgtgctttgcacgtccggccccaccgagcgagcgagtgcgcatagagggagtggccaa

SEQ ID NO: 190 - DNA, 4767 bp, Adeno-associated virus 4
  source 1..4767: mol_type = genomic DNA; note = Adeno-associated virus 4 / Dependoparvovirus primate 1 - NC_001829
ttggccactccctctatgcgcgctcgctcactcactcggccctggagaccaaaggtctccagactgccggcctctggccggcagggccgagtgagtgagcgagcgcgcatagagggagtggccaactccatcatctaggtttgcccactgacgtcaatgtgacgtcctagggttagggaggtccctgtattagcagtcacgtgagtgtcgtatttcgcggagcgtagcggagcgcataccaagctgccacgtcacagccacgtggtccgtttgcgacagtttgcgacaccatgtggtcaggagggtatataaccgcgagtgagccagcgaggagctccattttgcccgcgaattttgaacgagcagcagccatgccggggttctacgagatcgtgctgaaggtgcccagcgacctggacgagcacctgcccggcatttctgactcttttgtgagctgggtggccgagaaggaatgggagctgccgccggattctgacatggacttgaatctgattgagcaggcacccctgaccgtggccgaaaagctgcaacgcgagttcctggtcgagtggcgccgcgtgagtaaggccccggaggccctcttctttgtccagttcgagaagggggacagctacttccacctgcacatcctggtggagaccgtgggcgtcaaatccatggtggtgggccgctacgtgagccagattaaagagaagctggtgacccgcatctaccgcggggtcgagccgcagcttccgaactggttcgcggtgaccaagacgcgtaatggcgccggaggcgggaacaaggtggtggacgactgctacatccccaactacctgctccccaagacccagcccgagctccagtgggcgtggactaacatggaccagtatataagcgcctgtttgaatctcgcggagcgtaaacggctggtggcgcagcatctgacgcacgtgtcgcagacgcaggagcagaacaaggaaaaccagaaccccaattctgacgcgccggtcatcaggtcaaaaacctccgccaggtacatggagctggtcgggtggctggtggaccgcgggatcacgtcagaaaagcaatggatccaggaggaccaggcgtcctacatctccttcaacgccgcctccaactcgcggtcacaaatcaaggccgcgctggacaatgcctccaaaatcatgagcctgacaaagacggctccggactacctggtgggccagaacccgccggaggacatttccagcaaccgcatctaccgaatcctcgagatgaacgggtacgatccgcagtacgcggcctccgtcttcctgggctgggcgcaaaagaagttcgggaagaggaacaccatctggctctttgggccggccacgacgggtaaaaccaacatcgcggaagccatcgcccacgccgtgcccttctacggctgcgtgaactggaccaatgagaactttccgttcaacgattgcgtcgacaagatggtgatctggtgggaggagggcaagatgacggccaaggtcgtagagagcgccaaggccatcctgggcggaagcaaggtgcgcgtggaccaaaagtgcaagtcatcggcccagatcgacccaactcccgtgatcgtcacctccaacaccaacatgtgcgcggtcatcgacggaaactcgaccaccttcgagcaccaacaaccactccaggaccggatgttcaagttcgagctcaccaagcgcctggagcacgactttggcaaggtcaccaagcaggaagtcaaagactttttccggtgggcgtcagatcacgtgaccgaggtgactcacgagttttacgtcagaaagggtggagctagaaagaggcccgcccccaatgacgcagatataagtgagcccaagcgggcctgtccgtcagttgcgcagccatcgacgtcagacgcggaagctccggtggactacgcggacaggtaccaaaacaaatgttctcgtcacgtgggtatgaatctgatgctttttccctgccggcaatgcgagagaatgaatcagaatgtggacatttgcttcacgcacggggtcatggactgtgccgagtgcttccccgtgtcagaatctcaacccgtgtctgtcgtcagaaagcggacgtatcagaaactgtgtccgattcatcacatcatggggagggcgcccgaggtggcctgctcggcctgcgaactggccaatgtggacttggatgactgtgacatggaacaataaatgactcaaaccagatatgactgacggttaccttccagattggctagaggacaacctctctgaaggcgttcgagagtggtgggcgctgcaacctggagcccctaaacccaaggcaaatcaacaacatcaggacaacgctcggggtcttgtgcttccgggttacaaatacctcggacccggcaacggactcgacaagggggaacccgtcaacgcagcggacgcggcagccctcgagcacgacaaggcctacgaccagcagctcaaggccggtgacaacccctacctcaagtacaaccacgccgacgcggagttccagcagcggcttcagggcgacacatcgtttgggggcaacctcggcagagcagtcttccaggccaaaaagagggttcttgaacctcttggtctggttgagcaagcgggtgagacggctcctggaaagaagagaccgttgattgaatccccccagcagcccgactcctccacgggtatcggcaaaaaaggcaagcagccggctaaaaagaagctcgttttcgaagacgaaactggagcaggcgacggaccccctgagggatcaacttccggagccatgtctgatgacagtgagatgcgtgcagcagctggcggagctgcagtcgagggcggacaaggtgccgatggagtgggtaatgcctcgggtgattggcattgcgattccacctggtctgagggccacgtcacgaccaccagcaccagaacctgggtcttgcccacctacaacaaccacctctacaagcgactcggagagagcctgcagtccaacacctacaacggattctccaccccctggggatactttgacttcaaccgcttccactgccacttctcaccacgtgactggcagcgactcatcaacaacaactggggcatgcgacccaaagccatgcgggtcaaaatcttcaacatccaggtcaaggaggtcacgacgtcgaacggcgagacaacggtggctaataaccttaccagcacggttcagatctttgcggactcgtcgtacgaactgccgtacgtgatggatgcgggtcaagagggcagcctgcctccttttcccaacgacgtctttatggtgccccagtacggctactgtggactggtgaccggcaacacttcgcagcaacagactgacagaaatgccttctactgcctggagtactttccttcgcagatgctgcggactggcaacaactttgaaattacgtacagttttgagaaggtgcctttccactcgatgtacgcgcacagccagagcctggaccggctgatgaaccctctcatcgaccagtacctgtggggactgcaatcgaccaccaccggaaccaccctgaatgccgggactgccaccaccaactttaccaagctgcggcctaccaacttttccaactttaaaaagaactggctgcccgggccttcaatcaagcagcagggcttctcaaagactgccaatcaaaactacaagatccctgccaccgggtcagacagtctcatcaaatacgagacgcacagcactctggacggaagatggagtgccctgacccccggacctccaatggccacggctggacctgcggacagcaagttcagcaacagccagctcatctttgcggggcctaaacagaacggcaacacggccaccgtacccgggactctgatcttcacctctgaggaggagctggcagccaccaacgccaccgatacggacatgtggggcaacctacctggcggtgaccagagcaacagcaacctgccgaccgtggacagactgacagccttgggagccgtgcctggaatggtctggcaaaacagagacatttactaccagggtcccatttgggccaagattcctcataccgatggacactttcacccctcaccgctgattggtgggtttgggctgaaacacccgcctcctcaaatttttatcaagaacaccccggtacctgcgaatcctgcaacgaccttcagctctactccggtaaactccttcattactcagtacagcactggccaggtgtcggtgcagattgactgggagatccagaaggagcggtccaaacgctggaaccccgaggtccagtttacctccaactacggacagcaaaactctctgttgtgggctcccgatgcggctgggaaatacactgagcctagggctatcggtacccgctacctcacccaccacctgtaataacctgttaatcaataaaccggtttattcgtttcagttgaactttggtctccgtgtccttcttatcttatctcgtttccatggctactgcgtacataagcagcggcctgcggcgcttgcgcttcgcggtttacaactgccggttaatcagtaacttctggcaaaccagatgatggagttggccacattagctatgcgcgctcgctcactcactcggccctggagaccaaaggtctccagactgccggcctctggccggcagggccgagtgagtgagcgagcgcgcatagagggagtggccaa

SEQ ID NO: 191 - DNA, 4721 bp, Adeno-associated virus 7
  source 1..4721: mol_type = genomic DNA; note = `Adeno-associated virus 7 / Dependoparvovirus primate 1 - NC_006260
ttggccactccctctatgcgcgctcgctcgctcggtggggcctgcggaccaaaggtccgcagacggcagagctctgctctgccggccccaccgagcgagcgagcgcgcatagagggagtggccaactccatcactaggggtaccgcgaagcgcctcccacgctgccgcgtcagcgctgacgtaaatcacgtcataggggagtggtcctgtattagctgtcacgtgagtgcttttgcgacattttgcgacaccacgtggccatttgaggtatatatggccgagtgagcgagcaggatctccattttgaccgcgaaatttgaacgagcagcagccatgccgggtttctacgagatcgtgatcaaggtgccgagcgacctggacgagcacctgccgggcatttctgactcgtttgtgaactgggtggccgagaaggaatgggagctgcccccggattctgacatggatctgaatctgatcgagcaggcacccctgaccgtggccgagaagctgcagcgcgacttcctggtccaatggcgccgcgtgagtaaggccccggaggccctgttctttgttcagttcgagaagggcgagagctacttccaccttcacgttctggtggagaccacgggggtcaagtccatggtgctaggccgcttcctgagtcagattcgggagaagctggtccagaccatctaccgcggggtcgagcccacgctgcccaactggttcgcggtgaccaagacgcgtaatggcgccggcggggggaacaaggtggtggacgagtgctacatccccaactacctcctgcccaagacccagcccgagctgcagtgggcgtggactaacatggaggagtatataagcgcgtgtttgaacctggccgaacgcaaacggctcgtggcgcagcacctgacccacgtcagccagacgcaggagcagaacaaggagaatctgaaccccaattctgacgcgcccgtgatcaggtcaaaaacctccgcgcgctacatggagctggtcgggtggctggtggaccggggcatcacctccgagaagcagtggatccaggaggaccaggcctcgtacatctccttcaacgccgcctccaactcgcggtcccagatcaaggccgcgctggacaatgccggcaagatcatggcgctgaccaaatccgcgcccgactacctggtggggccctcgctgcccgcggacattaaaaccaaccgcatctaccgcatcctggagctgaacgggtacgatcctgcctacgccggctccgtctttctcggctgggcccagaaaaagttcgggaagcgcaacaccatctggctgtttgggcccgccaccaccggcaagaccaacattgcggaagccatcgcccacgccgtgcccttctacggctgcgtcaactggaccaatgagaactttcccttcaacgattgcgtcgacaagatggtgatctggtgggaggagggcaagatgacggccaaggtcgtggagtccgccaaggccattctcggcggcagcaaggtgcgcgtggaccaaaagtgcaagtcgtccgcccagatcgaccccacccccgtgatcgtcacctccaacaccaacatgtgcgccgtgattgacgggaacagcaccaccttcgagcaccagcagccgttgcaggaccggatgttcaaatttgaactcacccgccgtctggagcacgactttggcaaggtgacgaagcaggaagtcaaagagttcttccgctgggccagtgatcacgtgaccgaggtggcgcatgagttctacgtcagaaagggcggagccagcaaaagacccgcccccgatgacgcggatataagcgagcccaagcgggcctgcccctcagtcgcggatccatcgacgtcagacgcggaaggagctccggtggactttgccgacaggtaccaaaacaaatgttctcgtcacgcgggcatgattcagatgctgtttccctgcaaaacgtgcgagagaatgaatcagaatttcaacatttgcttcacacacggggtcagagactgtttagagtgtttccccggcgtgtcagaatctcaaccggtcgtcagaaaaaagacgtatcggaaactctgcgcgattcatcatctgctggggcgggcgcccgagattgcttgctcggcctgcgacctggtcaacgtggacctggacgactgcgtttctgagcaataaatgacttaaaccaggtatggctgccgatggttatcttccagattggctcgaggacaacctctctgagggcattcgcgagtggtgggacctgaaacctggagccccgaaacccaaagccaaccagcaaaagcaggacaacggccggggtctggtgcttcctggctacaagtacctcggacccttcaacggactcgacaagggggagcccgtcaacgcggcggacgcagcggccctcgagcacgacaaggcctacgaccagcagctcaaagcgggtgacaatccgtacctgcggtataaccacgccgacgccgagtttcaggagcgtctgcaagaagatacgtcatttgggggcaacctcgggcgagcagtcttccaggccaagaagcgggttctcgaacctctcggtctggttgaggaaggcgctaagacggctcctgcaaagaagagaccggtagagccgtcacctcagcgttcccccgactcctccacgggcatcggcaagaaaggccagcagcccgccagaaagagactcaatttcggtcagactggcgactcagagtcagtccccgaccctcaacctctcggagaacctccagcagcgccctctagtgtgggatctggtacagtggctgcaggcggtggcgcaccaatggcagacaataacgaaggtgccgacggagtgggtaatgcctcaggaaattggcattgcgattccacatggctgggcgacagagtcattaccaccagcacccgaacctgggccctgcccacctacaacaaccacctctacaagcaaatctccagtgaaactgcaggtagtaccaacgacaacacctacttcggctacagcaccccctgggggtattttgactttaacagattccactgccacttctcaccacgtgactggcagcgactcatcaacaacaactggggattccggcccaagaagctgcggttcaagctcttcaacatccaggtcaaggaggtcacgacgaatgacggcgttacgaccatcgctaataaccttaccagcacgattcaggtattctcggactcggaataccagctgccgtacgtcctcggctctgcgcaccagggctgcctgcctccgttcccggcggacgtcttcatgattcctcagtacggctacctgactctcaacaatggcagtcagtctgtgggacgttcctccttctactgcctggagtacttcccctctcagatgctgagaacgggcaacaactttgagttcagctacagcttcgaggacgtgcctttccacagcagctacgcacacagccagagcctggaccggctgatgaatcccctcatcgaccagtacttgtactacctggccagaacacagagtaacccaggaggcacagctggcaatcgggaactgcagttttaccagggcgggccttcaactatggccgaacaagccaagaattggttacctggaccttgcttccggcaacaaagagtctccaaaacgctggatcaaaacaacaacagcaactttgcttggactggtgccaccaaatatcacctgaacggcagaaactcgttggttaatcccggcgtcgccatggcaactcacaaggacgacgaggaccgctttttcccatccagcggagtcctgatttttggaaaaactggagcaactaacaaaactacattggaaaatgtgttaatgacaaatgaagaagaaattcgtcctactaatcctgtagccacggaagaatacgggatagtcagcagcaacttacaagcggctaatactgcagcccagacacaagttgtcaacaaccagggagccttacctggcatggtctggcagaaccgggacgtgtacctgcagggtcccatctgggccaagattcctcacacggatggcaactttcacccgtctcctttgatgggcggctttggacttaaacatccgcctcctcagatcctgatcaagaacactcccgttcccgctaatcctccggaggtgtttactcctgccaagtttgcttcgttcatcacacagtacagcaccggacaagtcagcgtggaaatcgagtgggagctgcagaaggaaaacagcaagcgctggaacccggagattcagtacacctccaactttgaaaagcagactggtgtggactttgccgttgacagccagggtgtttactctgagcctcgccctattggcactcgttacctcacccgtaatctgtaattgcatgttaatcaataaaccggttgattcgtttcagttgaactttggtctcctgtgcttcttatcttatcggtttccatagcaactggttacacattaactgcttgggtgcgcttcacgataagaacactgacgtcaccgcggtacccctagtgatggagttggccactccctctatgcgcgctcgctcgctcggtggggcctgcggaccaaaggtccgcagacggcagagctctgctctgccggccccaccgagcgagcgagcgcgcatagagggagtggccaa

SEQ ID NO: 192 - DNA, 4393 bp, Adeno-associated virus 8
  source 1..4393: mol_type = genomic DNA; note = Adeno-associated virus 8 / Dependoparvovirus primate 1 - NC_006261
cagagagggagtggccaactccatcactaggggtagcgcgaagcgcctcccacgctgccgcgtcagcgctgacgtaaattacgtcataggggagtggtcctgtattagctgtcacgtgagtgcttttgcggcattttgcgacaccacgtggccatttgaggtatatatggccgagtgagcgagcaggatctccattttgaccgcgaaatttgaacgagcagcagccatgccgggcttctacgagatcgtgatcaaggtgccgagcgacctggacgagcacctgccgggcatttctgactcgtttgtgaactgggtggccgagaaggaatgggagctgcccccggattctgacatggatcggaatctgatcgagcaggcacccctgaccgtggccgagaagctgcagcgcgacttcctggtccaatggcgccgcgtgagtaaggccccggaggccctcttctttgttcagttcgagaagggcgagagctactttcacctgcacgttctggtcgagaccacgggggtcaagtccatggtgctaggccgcttcctgagtcagattcgggaaaagcttggtccagaccatctacccgcggggtcgagccccaccttgcccaactggttcgcggtgaccaaagacgcggtaatggcgccggcgggggggaacaaggtggtggacgagtgctacatccccaactacctcctgcccaagactcagcccgagctgcagtgggcgtggactaacatggaggagtatataagcgcgtgcttgaacctggccgagcgcaaacggctcgtggcgcagcacctgacccacgtcagccagacgcaggagcagaacaaggagaatctgaaccccaattctgacgcgcccgtgatcaggtcaaaaacctccgcgcgctatatggagctggtcgggtggctggtggaccggggcatcacctccgagaagcagtggatccaggaggaccaggcctcgtacatctccttcaacgccgcctccaactcgcggtcccagatcaaggccgcgctggacaatgccggcaagatcatggcgctgaccaaatccgcgcccgactacctggtggggccctcgctgcccgcggacattacccagaaccgcatctaccgcatcctcgctctcaacggctacgaccctgcctacgccggctccgtctttctcggctgggctcagaaaaagttcgggaaacgcaacaccatctggctgtttggacccgccaccaccggcaagaccaacattgcggaagccatcgcccacgccgtgcccttctacggctgcgtcaactggaccaatgagaactttcccttcaatgattgcgtcgacaagatggtgatctggtgggaggagggcaagatgacggccaaggtcgtggagtccgccaaggccattctcggcggcagcaaggtgcgcgtggaccaaaagtgcaagtcgtccgcccagatcgaccccacccccgtgatcgtcacctccaacaccaacatgtgcgccgtgattgacgggaacagcaccaccttcgagcaccagcagcctctccaggaccggatgtttaagttcgaactcacccgccgtctggagcacgactttggcaaggtgacaaagcaggaagtcaaagagttcttccgctgggccagtgatcacgtgaccgaggtggcgcatgagttttacgtcagaaagggcggagccagcaaaagacccgcccccgatgacgcggataaaagcgagcccaagcgggcctgcccctcagtcgcggatccatcgacgtcagacgcggaaggagctccggtggactttgccgacaggtaccaaaacaaatgttctcgtcacgcgggcatgcttcagatgctgtttccctgcaaaacgtgcgagagaatgaatcagaatttcaacatttgcttcacacacggggtcagagactgctcagagtgtttccccggcgtgtcagaatctcaaccggtcgtcagaaagaggacgtatcggaaactctgtgcgattcatcatctgctggggcgggctcccgagattgcttgctcggcctgcgatctggtcaacgtggacctggatgactgtgtttctgagcaataaatgacttaaaccaggtatggctgccgatggttatcttccagattggctcgaggacaacctctctgagggcattcgcgagtggtgggcgctgaaacctggagccccgaagcccaaagccaaccagcaaaagcaggacgacggccggggtctggtgcttcctggctacaagtacctcggacccttcaacggactcgacaagggggagcccgtcaacgcggcggacgcagcggccctcgagcacgacaaggcctacgaccagcagctgcaggcgggtgacaatccgtacctgcggtataaccacgccgacgccgagtttcaggagcgtctgcaagaagatacgtcttttgggggcaacctcgggcgagcagtcttccaggccaagaagcgggttctcgaacctctcggtctggttgaggaaggcgctaagacggctcctggaaagaagagaccggtagagccatcaccccagcgttctccagactcctctacgggcatcggcaagaaaggccaacagcccgccagaaaaagactcaattttggtcagactggcgactcagagtcagttccagaccctcaacctctcggagaacctccagcagcgccctctggtgtgggacctaatacaatggctgcaggcggtggcgcaccaatggcagacaataacgaaggcgccgacggagtgggtagttcctcgggaaattggcattgcgattccacatggctgggcgacagagtcatcaccaccagcacccgaacctgggccctgcccacctacaacaaccacctctacaagcaaatctccaacgggacatcgggaggagccaccaacgacaacacctacttcggctacagcaccccctgggggtattttgactttaacagattccactgccacttttcaccacgtgactggcagcgactcatcaacaacaactggggattccggcccaagagactcagcttcaagctcttcaacatccaggtcaaggaggtcacgcagaatgaaggcaccaagaccatcgccaataacctcaccagcaccatccaggtgtttacggactcggagtaccagctgccgtacgttctcggctctgcccaccagggctgcctgcctccgttcccggcggacgtgttcatgattccccagtacggctacctaacactcaacaacggtagtcaggccgtgggacgctcctccttctactgcctggaatactttccttcgcagatgctgagaaccggcaacaacttccagtttacttacaccttcgaggacgtgcctttccacagcagctacgcccacagccagagcttggaccggctgatgaatcctctgattgaccagtacctgtactacttgtctcggactcaaacaacaggaggcacggcaaatacgcagactctgggcttcagccaaggtgggcctaatacaatggccaatcaggcaaagaactggctgccaggaccctgttaccgccaacaacgcgtctcaacgacaaccgggcaaaacaacaatagcaactttgcctggactgctgggaccaaataccatctgaatggaagaaattcattggctaatcctggcatcgctatggcaacacacaaagacgacgaggagcgtttttttcccagtaacgggatcctgatttttggcaaacaaaatgctgccagagacaatgcggattacagcgatgtcatgctcaccagcgaggaagaaatcaaaaccactaaccctgtggctacagaggaatacggtatcgtggcagataacttgcagcagcaaaacacggctcctcaaattggaactgtcaacagccagggggccttacccggtatggtctggcagaaccgggacgtgtacctgcagggtcccatctgggccaagattcctcacacggacggcaacttccacccgtctccgctgatgggcggctttggcctgaaacatcctccgcctcagatcctgatcaagaacacgcctgtacctgcggatcctccgaccaccttcaaccagtcaaagctgaactctttcatcacgcaatacagcaccggacaggtcagcgtggaaattgaatgggagctgcagaaggaaaacagcaagcgctggaaccccgagatccagtacacctccaactactacaaatctacaagtgtggactttgctgttaatacagaaggcgtgtactctgaaccccgccccattggcacccgttacctcacccgtaatctgtaattgcctgttaatcaataaaccggttgattcgtttcagttgaactttggtctctgcg

SEQ ID NO: 193 - DNA, 4679 bp, Adeno-associated virus 2 / Dependoparvovirus primate 1 - NC_001401
  source 1..4679: mol_type = genomic DNA; note = Adeno-associated virus 2 / Dependoparvovirus primate 1 - NC_001401
ttggccactccctctctgcgcgctcgctcgctcactgaggccgggcgaccaaaggtcgcccgacgcccgggctttgcccgggcggcctcagtgagcgagcgagcgcgcagagagggagtggccaactccatcactaggggttcctggaggggtggagtcgtgacgtgaattacgtcatagggttagggaggtcctgtattagaggtcacgtgagtgttttgcgacattttgcgacaccatgtggtcacgctgggtatttaagcccgagtgagcacgcagggtctccattttgaagcgggaggtttgaacgcgcagccgccatgccggggttttacgagattgtgattaaggtccccagcgaccttgacgagcatctgcccggcatttctgacagctttgtgaactgggtggccgagaaggaatgggagttgccgccagattctgacatggatctgaatctgattgagcaggcacccctgaccgtggccgagaagctgcagcgcgactttctgacggaatggcgccgtgtgagtaaggccccggaggcccttttctttgtgcaatttgagaagggagagagctacttccacatgcacgtgctcgtggaaaccaccggggtgaaatccatggttttgggacgtttcctgagtcagattcgcgaaaaactgattcagagaatttaccgcgggatcgagccgactttgccaaactggttcgcggtcacaaagaccagaaatggcgccggaggcgggaacaaggtggtggatgagtgctacatccccaattacttgctccccaaaacccagcctgagctccagtgggcgtggactaatatggaacagtatttaagcgcctgtttgaatctcacggagcgtaaacggttggtggcgcagcatctgacgcacgtgtcgcagacgcaggagcagaacaaagagaatcagaatcccaattctgatgcgccggtgatcagatcaaaaacttcagccaggtacatggagctggtcgggtggctcgtggacaaggggattacctcggagaagcagtggatccaggaggaccaggcctcatacatctccttcaatgcggcctccaactcgcggtcccaaatcaaggctgccttggacaatgcgggaaagattatgagcctgactaaaaccgcccccgactacctggtgggccagcagcccgtggaggacatttccagcaatcggatttataaaattttggaactaaacgggtacgatccccaatatgcggcttccgtctttctgggatgggccacgaaaaagttcggcaagaggaacaccatctggctgtttgggcctgcaactaccgggaagaccaacatcgcggaggccatagcccacactgtgcccttctacgggtgcgtaaactggaccaatgagaactttcccttcaacgactgtgtcgacaagatggtgatctggtgggaggaggggaagatgaccgccaaggtcgtggagtcggccaaagccattctcggaggaagcaaggtgcgcgtggaccagaaatgcaagtcctcggcccagatagacccgactcccgtgatcgtcacctccaacaccaacatgtgcgccgtgattgacgggaactcaacgaccttcgaacaccagcagccgttgcaagaccggatgttcaaatttgaactcacccgccgtctggatcatgactttgggaaggtcaccaagcaggaagtcaaagactttttccggtgggcaaaggatcacgtggttgaggtggagcatgaattctacgtcaaaaagggtggagccaagaaaagacccgcccccagtgacgcagatataagtgagcccaaacgggtgcgcgagtcagttgcgcagccatcgacgtcagacgcggaagcttcgatcaactacgcagacaggtaccaaaacaaatgttctcgtcacgtgggcatgaatctgatgctgtttccctgcagacaatgcgagagaatgaatcagaattcaaatatctgcttcactcacggacagaaagactgtttagagtgctttcccgtgtcagaatctcaacccgtttctgtcgtcaaaaaggcgtatcagaaactgtgctacattcatcatatcatgggaaaggtgccagacgcttgcactgcctgcgatctggtcaatgtggatttggatgactgcatctttgaacaataaatgatttaaatcaggtatggctgccgatggttatcttccagattggctcgaggacactctctctgaaggaataagacagtggtggaagctcaaacctggcccaccaccaccaaagcccgcagagcggcataaggacgacagcaggggtcttgtgcttcctgggtacaagtacctcggacccttcaacggactcgacaagggagagccggtcaacgaggcagacgccgcggccctcgagcacgacaaagcctacgaccggcagctcgacagcggagacaacccgtacctcaagtacaaccacgccgacgcggagtttcaggagcgccttaaagaagatacgtcttttgggggcaacctcggacgagcagtcttccaggcgaaaaagagggttcttgaacctctgggcctggttgaggaacctgttaagacggctccgggaaaaaagaggccggtagagcactctcctgtggagccagactcctcctcgggaaccggaaaggcgggccagcagcctgcaagaaaaagattgaattttggtcagactggagacgcagactcagtacctgacccccagcctctcggacagccaccagcagccccctctggtctgggaactaatacgatggctacaggcagtggcgcaccaatggcagacaataacgagggcgccgacggagtgggtaattcctcgggaaattggcattgcgattccacatggatgggcgacagagtcatcaccaccagcacccgaacctgggccctgcccacctacaacaaccacctctacaaacaaatttccagccaatcaggagcctcgaacgacaatcactactttggctacagcaccccttgggggtattttgacttcaacagattccactgccacttttcaccacgtgactggcaaagactcatcaacaacaactggggattccgacccaagagactcaacttcaagctctttaacattcaagtcaaagaggtcacgcagaatgacggtacgacgacgattgccaataaccttaccagcacggttcaggtgtttactgactcggagtaccagctcccgtacgtcctcggctcggcgcatcaaggatgcctcccgccgttcccagcagacgtcttcatggtgccacagtatggatacctcaccctgaacaacgggagtcaggcagtaggacgctcttcattttactgcctggagtactttccttctcagatgctgcgtaccggaaacaactttaccttcagctacacttttgaggacgttcctttccacagcagctacgctcacagccagagtctggaccgtctcatgaatcctctcatcgaccagtacctgtattacttgagcagaacaaacactccaagtggaaccaccacgcagtcaaggcttcagttttctcaggccggagcgagtgacattcgggaccagtctaggaactggcttcctggaccctgttaccgccagcagcgagtatcaaagacatctgcggataacaacaacagtgaatactcgtggactggagctaccaagtaccacctcaatggcagagactctctggtgaatccgggcccggccatggcaagccacaaggacgatgaagaaaagttttttcctcagagcggggttctcatctttgggaagcaaggctcagagaaaacaaatgtggacattgaaaaggtcatgattacagacgaagaggaaatcaggacaaccaatcccgtggctacggagcagtatggttctgtatctaccaacctccagagaggcaacagacaagcagctaccgcagatgtcaacacacaaggcgttcttccaggcatggtctggcaggacagagatgtgtaccttcaggggcccatctgggcaaagattccacacacggacggacattttcacccctctcccctcatgggtggattcggacttaaacaccctcctccacagattctcatcaagaacaccccggtacctgcgaatccttcgaccaccttcagtgcggcaaagtttgcttccttcatcacacagtactccacgggacaggtcagcgtggagatcgagtgggagctgcagaaggaaaacagcaaacgctggaatcccgaaattcagtacacttccaactacaacaagtctgttaatgtggactttactgtggacactaatggcgtgtattcagagcctcgccccattggcaccagatacctgactcgtaatctgtaattgcttgttaatcaataaaccgtttaattcgtttcagttgaactttggtctctgcgtatttctttcttatctagtttccatggctacgtagataagtagcatggcgggttaatcattaactacaaggaacccctagtgatggagttggccactccctctctgcgcgctcgctcgctcactgaggccgggcgaccaaaggtcgcccgacgcccgggctttgcccgggcggcctcagtgagcgagcgagcgcgcagagagggagtggccaa

SEQ ID NO: 194 - DNA, 4801 bp, Aleutian mink disease virus
  source 1..4801: mol_type = genomic DNA; note = Aleutian mink disease virus / Amdoparvovirus carnivoran 1 - NC_001662
attaattctcaaccaatattcgttagcaaccaacaccagctcgcttcgctcgcgcaccttcggcgctggtgttgggcgcttcgcgcttgctaacttcatattggttgagaattaatccgtgtctttcctgtggaatgaggaagtagtgtggtatataagcagaggttgcttggagcaaagcacagaccggttacagcaaagtaacatggctcaggctcaaattgatgagcagaggagactgcaggacctgtatgtgcagttgaagaaggagattaacgacggtgaaggagttgcctggttgttccaacaaaagacctacaccgacaaggacaacaaaccaaccaaagcaacaccgccactgaggacaacctcttctgacctaaggttagcttttgactctattgaagagaatttaacagcttctaatgaacacttaactaacaatgagataaacttttgtaaactaaccttggggaagacgttgctgttaattgataagcatgtaaaaagccacagatgggatagtaacaaagttaacttaatttggcaaatagaaaaaggaaaaactcagcaatttcatattcactgttgcttaggttactttgataagaatgaagatcctaaggatgttcaaaaatccttaggttggtttatgaaaagactaaataaagacctagcagttatctatagtaaccatcattgtgacatacaagatattaaggatcctgaagatagagctaagaacctaaaagtgtggattgaagatggacctactaagccttacaaatattttaacaaacaaaccaaacaagactacaataaaccagttcacttgagagactatacattcatatacctgtttaacaaagataagataaatacagatagtatggatggttactttgctgctggtaacggtggcattgttgacaacctaactaacaaagaacgaaaaactttaagaaaaatgtacttagatgagcagagttcagatataatggatgctaatatagactgggaagatggccaagacgcgccaaaagtaactgaccaaactgactcagcaaccacaaaaacaggaactagtttgatttggaaatcatgtgctactaaagtaacctcaaaaaaagaagttgctaatccagttcagcaaccttctaaaaaactgtactcagctcaaagtactttagatgcattgtttaacgttggttgctttactccagaagatatgattataaagcaaagtgacaaataccttgaactatctttagaaccaaacgggcctcaaaaaattaacactttacttcacatgaaccaagtaaagacatcaaccatgattactgcttttgattgtattataaaatttaatgaagaggaagatgacaaacctttgctagcaactataaaagacatgggacttaatgaacaataccttaagaaggtactatgtaccatcctaaccaagcaaggtggaaagagaggttgtatttggttctatggaccggggggcactggaaaaaccttgctagcatctttaatatgtaaagcaacagtaaactatggtatggttactacaagcaatccaaactttccatggactgactgtggcaatagaaacatcatttgggctgaagagtgtggtaactttggtaactgggttgaagactttaaagccattactggaggtggtgatgtaaaagtagacaccaagaacaagcaacctcaatctattaaaggctgtgtgattgtaacaagcaacaccaacataaccaaagtaactgttggatgtgtggaaacaaacgctcacgcagagccacttaaacagaggatgattaagatacgttgcatgaaaaccatcaaccctaaaactaaaataacaccaggcatgttaaaaagatggctaaatacctgggatagacaaccaattcaactaagccatgagatgcctgaactgtacttaggtaagtgccgttggtaagtaacacattttaaatgccaactttaaaccaacatcaatttatgaggttactttactttacagagactactggaccaaactcgagtgccacaactgccacgaagaatactggcaactcacaacctactactgcaaagagtgcagaaagtgtgaacacggaaaactgcgacacaccaaaaaggagtgcgagcagtgtgcctgcaaagcagcacaagagacctcggcatgagtaaaagtaaataacctacttaaagtaacctaacaccataacactttactttccttgtacttatgttactttactttagttcctcagcactatcctgggaaaaagagaagtgctccaagacacgtgtttattcagcaagcaaaaaagaagaagcaaactaaccctgcggtctaccacggagaggacaccatagaggaaatggattctactgaagctgaacaaatggacactgagcaagcaactaaccaaactgctgaagctggtggtggggggggtgggggtggtgggggtggtggtggtggtggtggggttggtaacagcactggcggctttaataacacaacagaattcaaagtaataaacaatgaagtgtatattacttgtcacgctactagaatggtacacattaaccaagctgacacagacgaatacttgatatttaatgctggtagaactactgataccaaaacacatcagcaaaaactaaacttagaattttttgtatatgatgattttcaccaacaagtaatgacaccttggtatatagtagatagcaacgcttggggtgtatggatgagtcctaaagactttcaacaaatgaaaacactgtgtagtgaaattagtttggttactttggaacaagaaatagacaatgtaaccataaaaactgtaacagaaaccaaccaaggtaacgcatctaccaagcaattcaacaatgacttaactgcgtcgttacaggttgctttagatactaacaacatactgccatatactccagctgcgccgttgggggaaacactgggctttgttccttggagagcaaccaaaccaacccaatataggtattatcatccatgttacatttacaacagatatcctaacattcaaaaagttgcaacagaaacactaacctgggatgcagtacaagatgattaccttagtgtggatgaacagtactttaactttattactatagagaacaacatacctattaacattctcagaacgggagataactttcatacaggcttgtatgagtttaacagtaaaccatgtaaactaaccttaagctatcaaagtacacgttgcttggggctacctcctctctgcaaaccaaagacagatacaacacacaaagtaacctcaaaagaaaacggagctgacctaatttacatacaaggacaagataataccagactaggtcacttttggggtgaggaaagaggtaagaaaaacgcagagatgaacagaattagaccttacaacataggttaccaatatcctgaatggataataccagcagggttacagggtagttactttgctggaggaccaagacagtggagtgacacaaccaaaggtgcaggtacacacagtcaacacttacaacagaactttagtactaggtacatctatgacagaaaccacggtggagacaacgaggtagacctattagatggaatacccattcatgaaagaagtaactactactcagacaatgagatagagcaacatacagcaaagcaaccaaagttacgtacaccacccattcaccactcaaaaatagactcgtgggaagaagaaggttggcctgctgcttcaggcacacactttgaagatgaggttatatacctagactactttaactttagtggtgaacaggagctaaactttccacatgaagtattagatgatgctgctcagatgaaaaagctacttaactcataccaaccaacagttgctcaagacaacgttggtcctgtatacccgtggggacagatatgggacaagaaacctcatatggatcacaaacctagcatgaacaacaacgctccatttgtatgtaaaaacaaccctccaggtcaactctttgttaaactaacagaaaacctcactgatacatttaactatgatgaaaatccagacagaataaaaacctatggttactttacttggagaggcaagcttgtactaaaaggcaaactaagccaagtaacatgctggaatcctgttaagagagaactcataggagaacctggtgtatttactaaagacaagtatcacaaacagataccaaacaacaaaggtaactttgaaatagggttacaatatggaagaagtactatcaaatatatctactaaagtaacctgtgtactatgttactatgttactatgataatatctcaataaaagttacatgaatagtgaacaacctaaatactgtgtacttccttattttaccagaaagtggcggattaaaataaacctacattctatactatctatatactactaactaacctataggttactttgctttgatatactgatgtaggaatacaggatactaacatttatatatatactaacatctatactactaacctaactatggcctaatgtatgcagtgtcggcgtcgccgacaactacattatattattaggcatagttaggttagtagtatagatgttagtatatatataaatgttagtatcctgtgttcctacttcagtatataaagaaagtttcctataggtgggtttgcggtctatctagagttgtggtccgtattggtttctgtaaaggacctga

SEQ ID NO: 195 - DNA, 4662 bp, Amdoparvovirus sp.
  source 1..4662: mol_type = genomic DNA; note = Amdoparvovirus sp. - NC_031751
gtattggttaagaattatccgtcatttctggtggaatgaggaagtgctggtgtatataagcagaggttactttactcaaagcacagagctgttcaagcaaagtaacatggctcaagctcaggttactgaacagagaaaactccgggagctatacgagagattgaaaacagaggttgctgacggtgacggtctcgcttggctgttccagcagaaaacatatactgacggagacaacaaaccaaccaaagcaacaccagcactgaggacaacttcatctgatttaaggtcagcttttgattctattgaagagctcttaactaatactactgaacacttaagtaagaatgatattcaattttgcaaattaaccttagcgaagacgttggtgttacttgataagcatgtgaagactcatagatgggatgctagcaaagttaacttaatctggcagatagaaaaaggacaaaccaaccaacttcatatccattgttgcttaggttactatgataaaaacgaagatccgaaggatgtgcagaaatccttaggttggtttattaagaaactaaacagagacctagcctgtgtctatagtaaccatcattgcgagctacaaggcattaaagatcctgaaagtaaagcaagtaacctagatgtttggattcgagatggagtaaccaaaccttacaagtactttaacaaacaaaccagacaagaatacaacaaatctgttaacttaagagagtatgtactaatatacttatttgacaaaaataaagtaactgaagatactaaggaaggttactttgctagtggtaacggtggaataattgatatactaactcttaaagaacgtaaagctataagaaaactttacttagatgaacagagttcaaatctattagaggatatggatgactgggatgagggccaagtggcgccaaaaccaaccgaccaaactgactcagcaacctcaaaaacaggaactgggttactgtggaaatcctgtgctaacaaagtaacctcaaaagataaggttactgaggttgctaagcaaccttctaaaaaagtaagcacagctaagggcgtgttagactgcctatatgactttggttgctttactccagaagacatgattttaaagatgggtgaaacataccttgaaatgtccttagaaacaaatggagctcagaaaattaacactttgcttcacatgaaccaagtaaagacatcaaccatgcttactgcttatgattgcattcaaaaatttaatgaagatgaagatgagcaacctctattagcaaccttaaaagagatgggactgaatgaatcagtccttaagaaagtactaggtaccatcctatctaagcaaagtggaaaaagaaattgcatttggttctatgggccaggaggtactggaaagactttactggcagggttactatgtaaagcagtactaaactatggtatggttactacaagcaacccaaattttccatggactgactgtggcaacagaaaccttatctgggccgaagagtgtggtaacttaggtaactgggttgaagactttaaggccatcactggaggtggtgatgttaaagtagacacgaaaaacaagcaacctcaatctatcaaaggttctgtgattgtaacaagtaacaccaacattaccaaagtaactgttggatgtgtggaaaccagtgctcacgtggaaccacttaaacaaagattagtcaaggtacgttgcatgaaactcatcaaccctaaaaccaaagtaacaccaggaatgctcagaaaatggctaagttcatgggacaaacaaccaatcaacctaagtcatgaaatgcctgagctttacttgggtaagtacctgatggtaagtaacatactttaaacacccactttaaaaccaacctagacttatgaggttactttactttacagagactactggacaaaacttgagtgccacgactgcggacaagagttctggcagctcactacaagctactgcaaggactgcagaaagtgcgagcacggaaagctcaagcacactaaaaagggctgcgagcagtgtgcctataaaacaccacaagagacatcggcatgagtaaaagtaagtaacctacctaaagcaacctaacactaagttccttggctagacttaacctcatgttactttactttagttcctcagcactatcctgggaaaaagagaagtgctccaagacacgtgtttattcagcaagcaaaaaagaagaagctaactaaccctgcggttcaccacggagaagacgctatagaggaaatggattctacggaacctgaacagatggacactgagcaagcaactaaccaaactgctgaagctggcggggggggaggtggggggggtgggggtggtggaggcggtggagttggtaacagtactggcggctttcataatacgacagaatttaaagtaaccaacaatgaagtgtttattacttgtcacgctactagaatggtacatatcaaccaagctgacacagatgaatacttaatatttaatgctggtagaactactaatactaaaacaccggtacaaaagctaaacttagaatttttcgtgtatgatgattttcaccaacaagtaatgacaccttggtttctagtagatagtaacgcttggggtgtatggatgagtcctaaagactttcaacaaatgaaaacactatgtagtgaaattgagttggttagtttggaacaagaaatagacaatgtaactataaaaactgtaacagaaaccaaccaaggtaacgcaactaccaagcaatataacaatgacttaactgcgtcgttacaggttgctttagatactaacaatatattaccctatactccagctgcgccgttgggggaaacactgggctttgttccttggagagcaaccaaaccaacccaatatagatattatcatccatgctacctatacaacagatatcctaacattcaacagaatgcaacagagagactggtatgggaagcaactcaagatgattatttaaatgtggatgaacaatactttaactttatcactgtagaaaacaacatacctatcaacatcctcagaacgggagataactttcatacgggcctgtatgagtttaaaagtaaaccatgtaaactaaccttaagctaccaaagtacacgttgcttaggtttacctcctctatgcaaaccaaagaatgataaaacacacaaagtaacagataaagaaaacggaggtgacatagtatacatagacggaaccaacaatactaaactgggtcactattggggtgaagagaaaggtcataagaatgcagaaatgaacagagtgagaccttacaacataggttaccaatttcctgaatgggtcataccagcagggttacaaggtagttactttgttggtggaccaagacaatggagtgacacaaccaagggtgcaggacaccgtgaatctgacccagtacaacaaaactttagtaccagatacatctttgacagaaaccacggtggagataacgaggtagatgtattagagtcagtacccattcaggaaagaggtaactactactcagaccatgaaatagaccaacatacagcaaagcaaccaaagttaaggacaccacctattcatcacactaagatagattcatgggaagaggaaggttggcctgctgcgtcgggaacacactttgaagatgaggtgatatacttagattactttaactatactcatgaaacggagaaagaatttccacatgaggttttagatgatggtgctcaaatgaaaaagctactgaatgcataccaaccaaccgttggtctagacaatgttggtcctgtttatccatggggacaagtatgggacaagaaacctgatgtggaccacaaacctagcatgaacaacagtgctccctttgtatgtaaaaacaaccctccaggtcaactccttgttaaactaacagagaacctcactgatgtattcaactatgatgaaaacccagacagaataaaaacctatggttactttacttggagaggcaaacttgtgttaagaggtaaactaagtcaaatagcatgctggaaccctgttaagagagaactcataggagaacctggtgtatatggtagtagcaactatcacaagcaaataccaaacaacaaaggtaactttgaaatagggttacaatatggaagaagtactataaagtatctgtactaaaccaacctaatgttactatgttactatgttactgtactaatatctcaataaaagttacataaagagtgatcaacctaaatactgtgtacttccttattcaaccagaaatgacggataaatataaacctatattctatagtatactatatctatactaacctctactatactaacatataggttactttgctttgatatactgatgtaggaatacagaatactaacctctactatatatactaaactctaatactaacctactctagctatatgcattgtcggcggacaagtatgggacaagaaacctgatgtggaccacaaacctagcatgaacaacagtgctccctttgtatgtaaaaacaaccctccaggtcaactccttgttaaactaacagagaacctcactgatg

SEQ ID NO: 196 - DNA, 4595 bp, Artibeus jamaicensis parvovirus 1
  source 1..4595: mol_type = genomic DNA; note = Artibeus jamaicensis parvovirus 1 / Artiparvovirus chiropteran 1 - NC_016752
gatgtgacgttggttgtcatcagtatttattgcggtgaacttccggtagcagccatttcactgctgacagccagaggggtaacatgtctcaggagattggaattagctttgtttttcgctttttaagcgaggatacgccatacaggcaacggctatggcatctagacagagcagtggactccgaagggtggccgccttacacccagtggccgagttccccttcagcttggaggatgaaccagttcaacagactgctacaagaggtacgtttccgattgcttgctattggagattgtagctggttcttacagatggaggaaagccctgggggtctcttgcactgtcatgggtggtgtgccagtatgatgtgctccactagacagctagcactagcattgacatctgggttcaagcagctaggaaggagcatgtatagtggtgtgaggaatggggaagattactatgaattctttagaaacaagaacagaaccatagcatccagaaaaggggagtttgtaatggcctacttattgccaaaactaccttcagacaaggaggttctatgggcagcaacaaatgtgcccgaattctcaccatatgctttatcagagcctatgaggagaactctaacgaggtgtgcagatgagatggcgtactcagcgccggcaacaacagggccaaggtgtgagactgcagcaagtgcaagattcagtgaactagtaaagtggctggtggataataaaatcatgaatgtcacagcctggagggcaatggacaacgaaggatacatatccttcctagctagtcatcaaggaaaacaccaagcaaccacagccatagccattgcttctcaacaactcattgaaacagctaacctctttgatatggcaacaagactgcagcccagcaatgagtggggtagaatagaaacactttttgaggacaatggatacgatcctcacaaaatggcagcactgttttacaactgggcaaccagacgaacaggcaagaaaaacacaatttggctatatggcccagccacaacagggaagactaatctagcatctgctatagctagagccagtgggaattatggctgtgtgaactggaacaacgcaaatttcccatttaatgactgtgtagacaaaatgctaatttggtgggaggagggatcgatgaaagaatgtcacgtagaggcagcaatggcaatactaggaggagtcccagttagagtagacaggaagaacaaagactcagcagtactaagatcaaccccagtaataattacatccaacgtagacatgaccatggtgcacagtgggaacacagagagtatggagcacaagctgccactagaggagagaatgataaaaataacactagcaaagaaactattgccagcattcggggtaatcactgtgggggagatatgcagatttttccagcacggtcaggacgtagcggaggaatggacagtgcaagagctcctggggaacttgcaaaaagatgactccatcgaacaggctacctggcaatcggaaaatgactggtttccgccactagagagcggggtggttgacttaggagacctgtcggccatatcacgtgacgagccagacagtgatgttgacgaaggggtggacgagcctgggttactagatagcctatcaagcacgaacacaggggaactatcgccatcgccacacacgtctacgcccaaccacgcctgcccccccgccccaaagaagcgcataaaagacccgtcagcgaacagcctcctcattagcgactgctgggacttcttggtcggtgagtaccctgggggaacgggaccaagggatacgacgccttgtaatagaggttgcctctacttctttcaggtctctgagcagaaccctgtgcttcgagggcagcacacatcctctgctgagggagatcagagacatcgaggactcaggtgagccatgacgatcaaaaagactaagggacaggtcccagacgagacaacatgggtagaccacttaatgtggttcctcagacgcctgttcgcacagggtcgaggaggcctggacgcaactgaatctctagaaaacagggatggaacatttgacacattcatagatgacatacaagctaaagatagagcaaatcaccaaagatggctgaaggaaaaggcagatagggacaggatcaaggccatcaaagccagagacagggaacggctgagagggacgctaatcacccaaaagatctcagagcaaaactgggaagacattaaacacatattcccagaactcgagaaacacgaagaagcaggaaaacacgcatacaaaacatttgaatacttgctacaccatccatcactgcaaagcattctagaaagccagaacccaagagagctgtgggaaacagagagagaaagggataagctagcaatggaagacataattaagaagcaggaggaggcagcagcactcacagacagggacaggtacgagccactgtcaggatttaggaccagggaatggccagacgactacactgacagggtcgacctcgagaaacaggaacgtgacctcgaggatgcccggcgagcggaagacgctcggagggaggctgaactccattttgtccctggtaaaggagatggcggaggagatacagaggcagattttcaggcacctgagagccaaccttcaatccctcatggagacgaccttgaggatcgtcgaggacttgtcctgcctgggcaccgttacactggtcccggaaactcggacgacaggggtgaacccctcggaccggtcgacgagctcgcacgagagcacgacagagggtatgccgacctgataaaagaagggataaacccgtacgtaaagtataacaggcatgataaggattttactgatgcgctagcagaagggccgggagggcagacttgggcagggaactttgcccaatcccttttccacttaaaaagaaaaataactgaggtccttgatccacaggctgtccgagacgcagatgcccaaagcaagaaagccaggatctctcaagagaagacagtaaatgaacctggcccggttggagcacctcctgaaaacgcttcagtggctgcaggaggaggcatgtcaggagatacagaagttgatcattctgctgggggaagtggaggagttgctgggagcttgtgggaagggggagcaaaattctctgccaataaagtagagacgtgtgtgagcaaaacagtgtgcgtgcttccctataacaaccaccaatacgatgcaattaagtcagaggggcagaatagaggtctgagctactttggatacaagacgccatgggggtacttagactacaaccaaatgaacgtccacttctcacctagtgaatttcaaagactcttagagaactatgatgcaatcagaccagcatctatatgctatagcattaaacacttaaccatcaaagatgtcaacatagccacagacagcagtacgaccataacagactcagccacaggaggactttgcataatggaagacacagggtacaacttgccatacgtgatagggaacatgcaacagacagtgccagatgcattgccaggcagcctctactacccacccaactacgcatacctgacagtcaaccaccgggtatcaactctgaataatcagagagctttctacgttttagaacacgggaacttcgctatcctgacaacaggagcagaacagaccttcacatacacatttccagaactgccgatgaaatctttaaacacacactgccaaaacccgcatcaaatgaataacccactttactcatacgttctgaagaaaagaactgcatcgggagaatggcaaaacattgcaaaagatgactacgcaaacaaaggtagcaacttcctcccaggaccgaaaatgaacagcacagcagaccacacagtgtacttcaggacagggacagagaagcggctgctaccaccgctgaacacggtgccatggagagaagctaggaactctgcagacggactgacatacttgccaggctccaaacaaccccccgcagactacaacctggaacttgcagatggagaccagacagactcactgtactatgaaaaaacagcctcaaatacacaagggaaaaactacagcgtgacactgatcccgacactgccgagcatggtatgggacacacgatcgctgtactacgaacagcaaatatgggccaaaataccagacatggacaaaagtttcatgccagaaccgcttttcggagggtgggggatgcacaacccaccacctcagatactgctaaaagtttaccccatgccagcatataacaccacagcaacagcaggaaaatcctacttgaaacaatacgccactttcatattaacagtaaaaatgacatgggacgtaaagccaaggtcagaccacctgagatggaacccacagccagcggtgcagccccccacattcaaagggacgtcggtctgctacaccatggacacaaacggaagcagttcatactacgtggaaccagacagggggtggactacccgattccgtgtcaaaaacctttaa

SEQ ID NO: 197 - DNA, 4694 bp, Avian adeno-associated virus ATCC VR-865
  source 1..4694: mol_type = genomic DNA; note = Avian adeno-associated virus ATCC VR-865 / Dependoparvovirus avian 1 - NC_004828
tggccagtttccaagacaggctcgctcgctcactcgggccggggccccaaaggggcccctagcgaccgcttcgcggtcgcggcccgagtgagcgagcgagcctgtcttggaaactggccagcactccggtgaggtaatgccgtcacgtggtcgggaatgggaacgggaaatctcgcgagaacgtaaacaaatataagacggcgccacacggcgctgcgtcatacgcgcgcgcgcaccggcgagatgaggtcgtactacgaggtcatcgttcagctgcccaacgacgtcgagagtcaggtacctggaatctccgattcgttcgtcaactggattacgtcgcgagaatggacgttgcctgaggacgccgattgggatttggaccaggtcgatcaagttcaactgacgctcggcgacaaaatccaacgggagattcgaactcattgggggacgatggccaaagaaccggactttcactattttatccaactggaacaaggtgaggtgttctttcatttacacgtcctgctggaaacgtgttccgtaaagccgatggtactcggaagatatatccgacatattcaacaaaaaattgtgagtaaagtctactgcgccacgagcctacgatggaaggatggatgcgtggtgaccaagaccaaaaatttcgggggcgcgaacaaggtccgggccgagtcgtatattcccgcctacctgatcccgaaacagcaaccggaagtgcagtgggcgtggactaacgtgcccgagtatataaaagcgtgcttgcaccgagaactgcgtgccagtctcgcgcgacttcacttcgaggaggcgggcgtctcgcaatccaaggaaaatctcgcgagaactgcagacggcgctcccgtgatgccgacccgcgtcagcaaacgctacatggagctcgtggattggctcgtggagaaggggatcaccaccgagaaggaatggctgctggaaaacagagaaagctttcggagctttcaggcctcgagcaactcggcgcgtcagatcaagacggccctgcaaggcgccattcaggagatgcttctgaccaagacggcggaggactacctcgtcggaaaggatcccgtctcggacgacgacatccgtcagaaccgcatctacaagattctggaactgaaccactacgacccagcgtacgtggggagtattttggtcgggtggtgccagaagaaatggggcaagcgaaacacgctgtggctgttcggacatgcgaccaccggcaagaccaacatcgcggaggctattgcccatgctgtgccgttctatggatgcgttaactggaccaacgagaactttccgttcaacgactgcgtcgaaaaaatgattatctggtgggaggagggcaaaatgaccgccaaagtggtggaaacagccaaggcgattctgggaggatctcgggtgagagtggaccaaaaatgcaaagcttcggttccgatcgaaccgacgccggtcattattaccagtaacaccaacatgtgttatgtcatcgacgggaacacgaccacgttcgagcataagcagccgttggaggacaggatgtttaagctcgaattgctgactcggttgcctgatgactttggtaaggtgaccaaacaggaggtgcgtcaattcttcaggtggtctcaggatcacctgacccctgtgatcccagaattcctagtgcggaaggcggagtctcgcaaaagacccgccccttccggggaaggctatataagcccgacaaagcggcccgcgctcgcagagcagcagcaggcgtcggagagcgcggacccggttcccaccaggtatcgtatcaaatgctcgaaacattgcggtatggataaaatgttgtttccttgccaaatttgtgaatcgatgaacagagatattaatatttgtgctattcataaaacgaccgactgtaaagagtgtttccccgactacggggataaagatgatgtagaactacccccctgtacagaacacaacgtgtctcgttgttatcaatgtcattcgggcgaattgtatcgcgtgacttcggactctgacgagaaacctgcccccgagagtgatgaaggcaccgagccatcctatgctccctgcacgattcaccacctgatgggcaagagtcacgggttagtcacttgcgcggcgtgtcggttgaaaaatagtacgttgcatgatgacttggatgacggtgatctcgaacaataaatgattgaaatgtagccatgtctctcatttctgatgcgattccagattggttggagcggttggtcaaaaagggagtgaatgctgcagctgatttctaccatttggaaagcggtcctcctcgtcctaaggcaaatcagcaaactcaagaatctcttgaaaaggacgattcgagaggtctcgtgttcccaggctacaattatctaggccctttcaacggtctagataaaggagaacccgtcaacgaggcagacgctgccgccttagaacacgacaaggcttacgacctcgaaatcaaggacgggcacaacccgtactttgagtacaacgaggccgacagacgtttccaggaacgtctcaaagacgatacctcctttggaggcaatttaggtaaagccatcttccaggccaaaaagagggttctcgaaccctttggtctggtggaagactcaaagacggctccgaccggagacaagcggaaaggcgaagacgaacctcgtttgcccgacacttcttcacagactcccaagaaaaacaagaagcctcgcaaggaaagaccttccggcggggcagaagatccgggcgaaggcacctcttccaacgctggagcagcagcacccgcctctagtgtgggatcatctatcatggctgaaggaggtggcggcccagtgggcgatgcaggccagggtgccgatggagtgggcaattcctccggaaattggcattgcgattcccaatggctggaaaacggagtcgtcactcgaaccacccgaacctgggtcttgcccagctacaacaaccacctgtacaaacgaatccaaggacccagcggaggcgacaacaacaacaaattctttggattcagcaccccctggggatactttgactacaatcgattccactgccacttttccccgcgagactggcaacgactcatcaacaacaactggggcatccgtcccaaagcgatgcgctttagactctttaacatccaggttaaagaggtcacggtccaagacttcaacaccaccatcggcaacaacctcaccagtacggtccaggtctttgcggacaaggactaccaactgccgtacgtcctcggatcggctaccgaaggcaccttcccgccgttcccagcggatatctacacgatcccgcagtacgggtactgcacgctaaactacaacaacgaggcggtggatcgttcggccttctactgtctggactactttccctcagacatgctgcggacaggaaataactttgagtttacttacaccttcgaggacgttcctttccatagcatgtttgcccacaaccagacgctagaccggctgatgaatcccctcgtggatcagtacctctgggctttcagctccgtcagccaagcaggctcatctggacgagctcttcattactcgcgggcgactaaaaccaacatggcggctcaatataggaactggttacctgggcctttcttccgtgatcagcaaatctttacgggcgctagcaacatcactaaaaataacgtctttagcgtttgggaaaaaggcaagcaatgggaactcgacaatcggaccaacctaatgcagcccggtcctgcggcagcgaccacctttagcggagaacctgaccgtcaagccatgcaaaacacgctggcttttagcaggaccgtctacgatcaaacgaccgccacgaccgatcgtaaccagatactcatcaccaacgaagacgaaatcagacccaccaactcggtcggtatcgacgcgtggggagcagttcccaccaacaaccagtcgatcgtgacccccggcactcgcgcggccgtcaacaatcaaggggcgcttcccgggatggtgtggcaaaacagagacatttaccctacagggacccatttggccaaaattcccgacactgacaatcacttccatccgtccccgcttattgggcggtttggctgcaagcatccccctccccagattttcattaaaaacacacccgtccctgccaacccttcggaaacgttccagacggccaaagtggcctccttcatcaaccagtactcgaccggacagtgcaccgtcgaaatcttttgggaactcaagaaggaaacctccaagcgctggaaccccgaaatccagttcacctccaactttggcaacgcggccgacatccagtttgccgtctccgacacgggatcctattccgaacctcgtcccatcggtacccgttaccttaccaaacctctgtaaattaaacccttcaataaaccgtttatgcgtaactgtatttccgtctcctgtcgttattcagtcacatgatgcggcattacctcaccggagtgctggccagtttccaagacaggctcgctcgctcactcgggccggggccccaaaggggcccctagcgaccgcttcgcggtcgcggcccgagtgagcgagcgagcctgtcttggaaactggcca

SEQ ID NO: 198 - DNA, 4682 bp, Avian adeno-associated virus strain DA-1
  source 1..4682: mol_type = genomic DNA; note = Avian adeno-associated virus strain DA-1 / Dependoparvovirus avian 1 - NC_006263
tggccagtttccaaaacaggctcgctcgctcactcgggccccggccccaagggggccggtagcgacgcctttggcgtcgcggcccgagtgagcgagcgagcctgttttggaaactggccagcactccggtgaggtaatgccgtcacgtggtcgggaacgggaacgggaaatctcgcgagaacgtaaacaaatataagacgacgccacacggcgctgcgtcatacgcgcgcgcgcaccggcgagatgaggtcgtactacgaggtcatcgttcaactgccgaacgacgtcgagagtcaggtacctggaatctccgattcattcgtcaactggattacgtcgcgagaatggacgttgccggaagacgccgattgggatttggaccaggtcgatcaagttcaactgacgctcggcgacaaaatccaacgggagattcgaaatcactgggggacgatggcgaaagaaccggactttcactattttatccaactggaacaaggtgaggtgttctttcatttgcacgtcctgctggaaacgtgttccgtgaagccgatggtactcggaagatatattcgacatattcaacaaaaaattgtcagtaaagtctactgcggccacgagcccgcgatggaaggatggatgcgggtgaccaagaccaaaaatttcgggggcgcgaacaaggtccgggccgagtcgtatattcccgcctacctgattccgaaacagcaaccggaagtgcagtgggcgtggactaacgtgcccgagtatataaaagcgtgcctgcaccgagaactgcgtgccagtctcgcgcgacttcacttcgaggaggcggggctctcgcaatccaaggaaaatctcgcgagaactgcagacggcgctcccgtgatcgcgacccgcgtcagcaaacgctacatggagctcgtggattggctcgtggagaaggggatcaccaccgagaaggaatggctgctggaaaacagagaaagctttcggagcttccaggcctcgagcaactcggcgcgtcagatcaagacggccctgcaaggcgccatccaggagatgcttctgaccaagacggcggaggactacctcgtcggaaaagaacccgtctcggacgacgagattcgtcagaaccgcatctacaagattttggaactgaaccactacgacccagcgtacgtggggagtattttggtcgggtggtgccagaagaaatggggcaagcgaaacacgctgtggctgttcggacctgcgaccaccggcaagaccaacatcgcggaggctattgcccatgctgtgccgttctatggatgcgttaactggaccaacgagaactttccgttcaacgactgcgtcgaaaagatgattatctggtgggaagagggcaaaatgaccgccaaggtggtggaaacggctaaagcgattctgggaggatctcgggtgagagtggaccaaaaatgcaaagcttcggttccgatcgaaccgacgccggtcattattaccagtaacaccaacatgtgttatgtcatcgacgggaacacgactacgttcgagcataagcagccgttggaggacaggatgtttaagctcgagctgttgactcgtttacccgatgactttggtaaggtgaccaaacaggaggtgcgtcaattcttcaggtggtcccaggatcacctgacccctgtgatcccagaattcctggtgcggaaggcggagtctcgcaaaagacccgccccctccggggaaggctatataagcccgacaaagcggcccgcgctcgcagagcagcagcaggcgtcggagagcgcggagccggttcccaccaggtatcgtatcaaatgctcgaaacattgcgggatggataaaatgttgtttccttgccaaatttgtgaatcgatgaacagaaatattaatatatgtgcgattcataaaacaacggaatgtaaagaatgttttccggaatacggggataaggacactgtgccagaactacccccctgtacagaacataacgtgtctcgttgttatcaatgtcattcgggcgaattgtatcgcgtgacttcggactctgacgagaaacccgcccccgagagtgatgaaggcactgagccatcctatgctccctgcacgattcaccatttgatgggcaagagtcgcgggttagtgtcgtgtgctgcatgtcgtttgaaaaatagtacgttgcatgatgacttggatgacggtgatcttgaacaataaatgattgaaatatagccatgtctctcatttctgatgcgattccagattggttggagcggttggtcaaaaagggagtgaatgctgcggctgatttctaccatttggaaagcggtcctcctcatcctaaggcaaatcagcaaactcaagaatctcctgaaaaggacgattcgagaggtctcgtgttcccgggttacaagtatctaggccctttcaacggtctagataaaggaaaacccgtcaacgaggcagacgctgccgccttagagcacgacaaggcttacgacctcgaactcaaggacgggcacaacccgtactttgagtacaacgaggccgatagacgtttccaggaacgtctcaaagacgatacctctttcggagggaatctcggtaaagccatctttcaggccaaaaagagggtcctcgagccctttggtctgattgaacaacccgacaacacggccgggaccggggagaagcgtcccgaacgcgtcgacgactttttcccgaaaaagaagaaggccaagaccgagcaaggcaaagcccctgctcaaacgggcgaagaccccggagaaggaacctcttccaacgctggatcaagcgccccctctagtgtgggatcatctgtcatggctgaaggaggtggcggtccaatgggcgatgcaggccaaggtgccgacggagtgggcaattcctcgggaaattggcattgcgattcccaatggctggacaacggagtcgttacccgaaccactcgaacctgggtcctgcccagctacaacaaccacttgtacaagcggatccaaggaccgggaggaaccgaccccaacaataaattctttggattcagcaccccctgggggtactttgactacaaccgattccactgccacttctccccccgagactggcaacgactcatcaacaacaactggggcatccgacccaaagcgatgcgctttagactctttaacatccaggttaaagaagtcactgtccaagactccaacaccaccatcgccaacaacctcaccagcacggtccaagtctttgcggacaaggactaccagctgccgtacgtcctcggatcggctacagagggcaccttcccgccgttcccagcggatatctacacgatcccgcagtatggttactgcacgctaaactacaacaacgaggcggtggatcgttcggccttctactgtctagactatttcccctcagacatgctgcggacaggaaataactttgaattcacttacacgttcgaggacgttcctttccatagcatgtttgctcacaaccagacgctagaccggctgatgaatcctctcgtcgatcagtacctgtgggctttcagttccgtcagccaaacaggctcgtctggacgggcactcaattattcacgcgcgaccaaaaccaatatggcaacccagtacagaaactggttacctggacccttcgtccgggatcagcaaatctttacgggggctagcaacatcacccaaaacaacgtgttcaacgtttgggataaaggcaagcagtgggtgatagacaatcggatcaatatgatgcagcccggccctgcagcagcgaccacctttagcggagaacccgaccgtcaagccatgcaaaacacgctggcctttagtcggacggtctacgaccagacaaccagtacgaccgatcgtaaccagttgctcattaccaacgaagatgaaatcagacccaccaactcggtcggcatcgacacgtggggagtagttcccaacaacaaccagtccaaggtgaccgccggcactcgcgcggccatcaacaaccaaggggcgcttcccgggatggtgtggcaaaacagagacatttacctccaaggacccatttgggccaaaatccccgacacagacaatcacttccatccgtccccgcttattggcgggtttggctgcaagcatccccctccccagattttcattaaaaacacacccgtcccggccaacccttcggaaacgttccagacggccaaggtggcctccttcatcaaccagtactcgaccggacagtgcaccgtcgaaatcttttgggaactcaagaaggaaacctccaagcgctggaaccccgaaatccagttcacctccaactttggcaacgcggccgacatccagtttgctgtctccgacaccggatcctattccgaacctcgtcccatcggtacccggtaccttaccaaacctctgtaaattaaacccttcaataaaccgtttatgcgtaactgtacttccgtctcctgtcgttattcagtcacatgatacggcattacctcaccggagtgctggccagtttccaaaacaggctcgctcgctcactcgggccgcgacgccaaaggcgtcgctaccggcccccttggggccggggcccgagtgagcgagcgagcctgttttggaaactggcca

SEQ ID NO: 199 - DNA, 4682 bp, Bat adeno-associated virus YNM; identical to SEQ ID NO: 198
  source 1..4682: mol_type = genomic DNA; note = Bat adeno-associated virus YNM / Dependoparvovirus chiropteran 1 - NC_014468

SEQ ID NO: 200 - DNA, 5203 bp, Bat bocavirus
  source 1..5203: mol_type = other DNA; note = Bat bocavirus - NC_029300
ccgccgtcatgtttccgtgacgcaatgatgacgtatactactacatatgcatataaagataatttcaatacttgcatattgatgaggggcggggttaggggtggggctgacctttaagatttgcataaatatgggaggtgccaacaacagccaatcagaaaaggcttcggggtgaaatctgattggtcaaccaacacatatataccggtgcacccggaaggaggtgtcattcgacggagagcacgtctagggtgagtgtcgctcctgccttctctgctatggccacgtcagctctatccttactgggggagcccagcattgaagagatcaagcggttcgggggtcctgcttacacctttgtgctaaagctgcctctgcctaactggcaggatcaggaattatacctgcagcgcacatttagtgtgctctatggagggcagctggaatcaagagcagactttcagggcctaagcagcttggacagtctagctctggtcagttttctgatcaaccatgggccacacaagtcctatatctatacattaactgacgctgcacataaagctgcaaaaatggccttctgcaaaaaacaggggacatctagtcctacctgcagcatctatgcacaaggagagctcggcagccatcacttacatgtacatctggtattagccggtacgggactaaacaaatacaatgccaaggcatggaggtctctgctggcctacaactggtttggaaacttactgactgtcgcatgcacaatggacagagtgaggccagctatgccagacattgtcactctgctgcacacctcacgggatcagtgtgtagagggagacggcagtgactactgcaccatcctgcaatacaggagccgcgagggacacatgtacgcctgcagagttgacggggcagaatacatctgcaactacctgctgcctaagaatcttaaatactatacctttttggaacctagtgaagtgactccatttgactccttctttatcaatatctcggcagcaaaaacttatggggtaactctgctaaacggaaactacgtttccgaaaatattaggaaacagtgggtgcaacagctgcagcaagaaatctgccgtctcgcagaggaacctgtgtttactggagacatcttcgggaccttacctgaggtatctaaagctgtatggcaaggttctagcaagccgggtggcaggatgactaagaaagagggattgatgattgattgtttgcgccgctgtcatgaaaatcacttgttaacatatgaagatcttgttaacacttgtcctgatttaatcattatgttagaaagtcaacccggagggagcaaacttatagagcaaacattgcacatgatgcacataaagattgcgcagacacataccgcaatgtcatttattcagaccaggtacacagatgatgcaataaccgggcagaacaaagtctttaagttgcttgcttttcaaggatataatccttggcaggtggggcactgggtgtgctgtttgctcagcaaacaatctggcaaacagaacactctgtctctgtatggtcctgccagtactggaaagacaaacttggcaaaagcaattgtaaactgtgttaaactgtatggcaatgtaaatcacttgaataagaactttgtctttaatgattgcgcggcaaaacttatcatatggtgggaagaagctctaatgcactgtgactatgtggagcaggcaaaatgcctgctggggggcacagagtttcgggtagaccgcaaacacaaggactcacagctgttaccgcaaacacctgtgattatctcaaccaacaataacatctatgaagtcacaggtgggaatacagtgacaggtgtgcactcgaaacctttgcgggaaaggattgtgcagctgaacctcatgaaacagctaccagccacttttggggagatctcttgtgatgaggtggcagcctggctcttggcctgcaaagcgcggtaccaaataggactcacagacttttatgagcaatggacactggggactgtgccaaatgactttcctctcgctaatccatgtgctggtcacttacaggacttggtcctggatgattgtggggtttgtgacgtctgtggttgccggaagcctcttgatttcgactggactgtggctgtaccgtctactgagacacctcctgcaactccaagatcaggtagagacacttttaaaattctcacaccaacaaaaattcatttctggtgcactgaatttgacctgtcctaccttgactctccaggaactcccggaaggaagcgggatctggatgagaaagtctccaagtcgccggcatcacctcgtccaagtacgccttccgcgcctaaaaaacctaagaggaaactgagtctagaggtacgtgcagctgactgctgggcatcacaaccacaaaatgagctcgagatcctacaatacgaaacagagctccaggacaaagagcagctacaggagcaggagccggtcacctctagcacaggcctcacaccgtcagaatggggacagcggctcggagtcatctcacagggaccggggaaatcgccaatcgtcctacactgctttgaaacaatcccggagagcgaggacgacaccgattgaggtgttcacgcggcacagagccgcaaacaatgtggacattcagtactgtgggttctactggcacagcaccaggctggccagagccgggactgattggatctttaatgaggggaaacaaaaattccaggaaaggatgaataacaatgtaatcaaatgggaagactgtagggagctactgtttgattttaaaaaatgtcaggatcagaaatatagaaatatcatgtatcacttgtcgcggggggggcattgtcataaatgtgaatactggggtaacatgtatcttcaacatctcgcacaggttgagactgaacaaacacaacctgaggtgtctgatcaaaagatgttggagatggctatgcaattggatggcaccaataaatagaaagcctcgcggttgggttttgccaggctataaatacttgaggcctttcaacccactagaaaacggagaacctgttaataaagctgacgaggcagctcgcaaacacgatattgcatacaatcaatacttagagaaaggacaaaatccatacttaaatttcaataaagctgatcaaactttcattgacgatttgcgtcacgacaattcatttggcggcgccatcgggaaaacatacttttcaataaaaaagacactcttcccacatctggcaggagagggtgagcctcctgccaagcgcagcaagccaggggaaagagcagccaagagaaaacaatactttgccagatcaaacagacaagccaaacaacaaagaatggaacagcctgatgctgcggcggctgatgaaaccagcaccacaccacactcgcgctcggcacgatcagccggtgggggaggaggaggtccgggaggatcaggcggctctggaggagggggaaactctgttggcttcagtacagggggttgggacgcgggcagcatcttcactgataatatcatcatcaccacaaacacgcgccagtggtacgcgccaatatatgacgggcacaagtacaagaaacacaaagccggggacaatgggggaacagacagtgactggtcaggaatcagcacaccctggggcgtgttcaacttcaactgttatgcctctcacttctcaccacaagattggcaaaggctgacaaacgagtatgtcaagtggagacctaagtccatgacagttaaaatctataacctgcaaatcaagcaaatagtaaagctgggggcagacactctatacaacaatgatctgacagcaggggtccatgtcttctgtgacggaagccatagatacccatactcacaacatccatgggacaaagacaccatgccagagctgccagacgagatctggaaactgccacaatatgcctattaccaaatccaggatgacttagccgagaaagcctcgggggacaatgtcatcaaccctgatgacatgtccaaaaacctcatcagggacgcgccgctatatatcctagaaacatccacacatgaagtgctccggaccggagaagacaccagcttcaacttcacattctcatcaggctgggtcatgaatgacagggcattctgtcctccgcaggcagacttcaatccactctcacaaaccagaagatactcagctcacagagacaacaacaaaaacatttttggacggtacaacccgtacaaaaaacccagcaactggttcccgggaccagcgctgtcctacactggcaacctaaagaaaaacaatggctaccaaacaggaaaaacaaccgcacctatcactgtcacgtaccagcacccacacgaggcatcaagaaacagcacagccacggcaacaggggtctccatgcctaatgaggaaggagcccgcaaaagcggctacaatgtcactcccgtaaatcacgcctacgcggcagcagaaaacatcactctaggatatgactctgcaccgcagagtgaggccatagaaaacatcaccacagttgacgtagacagggatatgacgcgctggggaagcctatgggcctgtgacggggtagagggaacctacgcgcaaatcaagcacagctggatgtttcccatgcaagcctggaatgggattcccatagccagatacacaccaatatgggtcaagattccaagaacagacttccacactctactggattctccagatggaactctgcccatgacacatccaccaggcaacatcttctgcaaggtcgctaaaataccagtaccctcaactgatacggaaagcttcctcaacatctacgtgacaggacaagtcacctgtgaaatcgtctgggaagcagagagataccaaaccaaaaactggcgtccagagatcaggaatgatgtcaaaagcttcaaagatgcacatctctatgactttgacacagccgggaagtacaacacaccagaaaacttcaatgaggaaatgcctacgcgcatgggcatcaaccgcgttctgtaaacaaatctgtatccgcttgccaaaaataaaattttgatataatcttctatagtacatgtttagtagacgtcattagtttggcttagtttcaatcttagtttcatgggt

SEQ ID NO: 201 - DNA, 4995 bp, Bat bocavirus WM40
  source 1..4995: mol_type = genomic DNA; note = Bat bocavirus WM40 / Bocaparvovirus chiropteran 2 - NC_039046
gtatccttgtatactatgtctttctctacatttttgagcgatttgacatcttttcatcagcctgcatatacctacgtgctgaaaattccatacgatgagtggcgcggccatgaggagcatatacattggtgtcttagccagactaatcgagacctactcaagacagtcgacacctggcacattcctgagatggacagtcctggtgagcagatatacttttacgatcgatatgggcctgatcagggttactgctcgcagatcactcttgctgctttcaatgctgttcttaagatctttagaatcaaacagagcacttccagccctgattttagcagttatattcaagccgagcatggtgagcgggaccttcacgttcacgttgtcattgccggacagggtcttaacaagtataacgctaagccatcttcaaaactccttgcttaccatttctttcgcgatctgaaggatgccatgaacagaaacaagggtcttgcagactggcagtcgcctgccattgacttctacaatgccatcgactcggccattaaagattgccaagcagacagccatactaagcactgtactatcctacaatacagagcaagagcgacaggggatatgtatgcgtgcagagtagatgcggtagagcacattgtcaattatctgctaccaaaaaatatgaaatgctacaactttattgatccggatcgtcatactccatttgctgcctggtttgctcttggtacgaagcactacgctcataccagaataaatggactgccactagacccgtttatccgcaagaagctctacaacgaattaaaccagacggtggttaacaagacggtcgagccagtatttgcgggcgacgcctttaccgagataccagaggtaggtaaaaccgcatggactaagaccggagggcatagttcagccaagatgagcaaaaaggagtcgttaatgtgtgactgtcttaaacgctgtgtcagcgatcacttactgacctatgaggatctagttgctaaacatccagatatggtaattatgctagaatcacaaccagggggtaatagacttatcgaacaactactgcaaatggtgcacattaaaataactcagatgcacacggcgcttacttatattcagctcagattcaaatcagatggtgtcaaagctgaaaataaagtatttcaattacttaatatacaaggatacaatccatggcaagttgggcattggctatgctgtatgctacataaacaagctggaaaacaaaacacagtgtcattttttggaccagcaagtacaggcaagacaaacatagctagagccatagtcaacgctgttaaattgtatggatgcgttaaccaccaaaataaaaattttgtatttaacgatacagcatcaaaattgattatttggtgggaagaatgcttaatgcacactgattgggtcgaacaaagcaaatgctgcttgggaggcactgagtttagaattgatagaaaacacagagactcaatgctattaccacaaactcctgtaatcatatctaccaacaacgatatctacactgttgttggcgggaacactatcagtacagtgcatgccaagccgataagagaaagggtggtgcagttcaacatgatgaaacaactaccacagacatttggagagatcacagtccaagaggtcgctgactggttgctgacgtgctcagttaattttccaatctcattggctgggtttctggatatacggaacctgaaggcggtgcctaacgactttccacttaataaattgtgtgcctctcacacacaggacttcattctgcatgaagtgggactgtgctccgtatgtggtggctacattcctcttgattccagtgatcgtagtgctgagcctgctgtacctacaccaactgcaaccgagggtgagttcatttttacatatgcaccactaagttcagccgcgacagctaaagcagtcgctgactttaatatttctttattagacacaccaccaaagagtggaaggaagcgggatctggattcggacaacgagcagccgtcgacatcgacatctacatctacgcctgccaaggtcgctcggcgtcgcctttccatcagtgaggaggtagcctacgactgcgttcaattcttagataagtgggcatctcaaccacaagatgagctcgagaagcagctattcgaaatcgagcagcgggagctacagcaaccgcaagcgcagccgaaccaggagcaggagcccgatccgtccaagcgggagctcacaccatcagaatggggagagctactcgggatccagccgagggagtccgcggaacaaccgccgaccgttctctggtgcttcgaaacgctcgaagactcagaaacagaaaatgactccgtgggtggtatttagtgagcataaagctaaaacgggcactgatttgcaattctgtggcttttattatcatagtacaagactagctagaaatgggactgattggatttttaataaaggaaaaccactgtttcaatctaaatcaaaaaacaatgtatgtgaatggggggaagtgcgggagattttgtttgaatttaagaaatggattgatcagggttatcgtaatatgatgtggcatttcaaaaatgggcaaccatgtgtacgctgtgggtactgggatgatgtctatggtcagcatctagctaacattacacatacttctgccgaccaggacgtaactgacgaagaaacgcttgagtcagccatggaggtggatggcgccaactaaccgtaaaccgggtggttgggttattcctggctacaaatatcttggaccatttaacgatcttgataacggggaacctgtaaacgctgcagataaagcagctcgtgatcacgattttgctcaccaatcctatattgaaaagggtcaaaatccatatttgaatttcaataaagctgatttgcaatttattgacgacttgcgtaacgactggtcatttggagcgatcgttggctctgccgcgttcaaggctaaacaagccattgcgccatcgttatctaacgataacgagcgacctggcacatcgaaacaagcagcggcagcagatcgggccgcaaaacgaaagctatactttgctcgttccaataaagggagcaaagtatctaaaatggataatcctggaggcgataacaatgaaccacaagataatggttcgggtccatcgtccggacaagacagagccggtggcggagggggtggtggtggtggcggagccaaccctggaggaggaagcggtggccatggagtgggagtgagcacaggcggatggaaagctggatgtgtgtttaccgatcggtatatcattaccacaaacacacgccaatggtattgtcctatatataatggacataaatatacaaaaatgacatcagatgatgctggacaaaatggctttaccatgtgggaaggaatcgcaactccatgggggcattttaattttaatgcatacaccagccatttttcaccgcaagactggcaacgactgaccaatgaatataaaaaatggaggccagtcaaaatgcgagtcaaaatctacaatttgcagataaaacaaattgtgaatcttggaatggacacactgtacaacaacgatctaactgcaggtgtccatatattttgtgatggttcacatcaatttccatactcacaacatccatgggacgaaggaaccatgccagaactacccaatgaaatctggcgacttacgcaatatgcgtattaccaagacaacagagatcttgtcgatcaatcacaagatcaagtaacaccactggatgttgaaaagctgctacgagtaaatacaccattgtttattcttgaaagcgcttcacatcaagttctcagaacaggcgaagaaactagttttgactttgacttcaactctggctgggtctttaatgacagagcatacgcaccaccacaagcagactacaatccactaattgcaacacgcagacattatgcaacatggaacagtcaaacaaaggaatatgcatacaacagatactcaccctatgcaaaaccaagccaatgggtgccaggaccaagtctacaatacaaaggagacacacgtacatccgccgaaccagcacgagaacgtggtccacttacagtaacatatggaccaccaggaacacacagacaagacgaagacaaccaagaaggacaatttatgccgagcgaagatccaacaaaaccacaatcagttcagcgcatcgggtattccattgcaccaatcaatggtgcatgcagtggactggacccgcatacactagcatatgactcaagtccacacagcagagacgaccgattcatgacagtaagaaacatcgatcttgatatgaccagatataatgcacttgaagtatttgatggaagcaccattaatggtggacgagccaggctcaaaaacatgtggatgtatccaaaccaagcgtggaactccacaccaatcagccgagcaaatccgatttggataaaaacaccaagaacagacaatcacacactgctcgatacatcagacggaacaataccaatggaacatcctcctggtattatctttatcaaagtggcaaaaattccgatacctacagacaacaacgcagattcgtacctaaatttgtacgttacaggccaagtaacatgtgaaattctttgggaatgcgaacgctaccagacaaagaattggcgaccagaaatcagaaacaccgcacaagtcttcaaagaaggaggcttgtttgactttaataaacaaggggaatacaacactccagaccatttctatgaatcaatgccaacaagaattggcatcaaccgtgtgctgtaaatcattaacaaccaataaaccgttaattcgtaaaccattaaatgtgtgtctcattattgctattagtggattgtagtctgcttgtggtggtgcgtatgtttca

SEQ ID NO: 202 - DNA, 4832 bp, Bat bocavirus XM30
  source 1..4832: mol_type = genomic DNA; note = Bat bocavirus XM30 / Bocaparvovirus chiropteran 3 - NC_039047
gagtgatatgaagagcatatacattggtgtcttagccaaggcaatcgagacctactcaagacagtcgacacctggtacattcctgacatggacagtcctggtgagcaactatactttttcgatcgatatgggcctgatgagggttactgctcgcagatctctcttgcagctttcaatgctatttttaaagtctttagaatcaaacaaagcgttgccagccctgattttagcagttttgttcaagccgagcatggtgatcgggacttgcacgttcacattgtcgctgccgggcaaggtcttaacaagtataacgctaagtcatctactaaactcatcgcttaccatttctttcgcgatttaaaagacgccatgaatcggaataaagattccgcaatatggccgacaccagctaatgacttttatgctgcaattgaccctgctatcacagaatgtcaggctgaaaatgtatctaaatattgtacgatcttacaatataaggccagagctactggagatacatatgcgtgtcgagtggatgctacagaatacatcacaaattatttattacctaagaacttaaaatgctatacttttatggatccacaacgccatacgcctgcgtctgcatttttcgcgacatatcaaaaaacatacgcgcatacgcgtgtaaatggaattccacttgatccattcattcgtcgtcaactgcatacagcattgaataatacggtggtgaacaagtctgttgaaccagtcttctcgggagacccatttatggacttacctgaggtgggtaaaacaacatggacaaaaacagggggacactcgtctactaaaatgagtaaacgagaaactctaatgtgtgattgtttgaaacgctgtgttgctgaacatttgttaacatatgaggacttaattgctaaacatccagatatggttattatgattgagtctcaaccaggtggtagtagactactagaacaattattacaaatggtacacattaaaatcacacagcaacacacagcactaacatatattagtgcacggtatgctgattcagttactggggttaaaccagaaaataaggtatttcaattactaaataagcaaggatacaatccatggcaagttggacattggatatgctgtgtattacataaacaagctggtaaacaaaatacaatatcattttatggaccagctagtactggaaagacaaatcttgctaaagcaattgtaaatactgttaaattatatggatgtgtaaatcatcagaacaaaaattttatatttaatgatgcagctgcaaaattggtaatttggtgggaagaatgtttaatgcatactgactgggtcgaacagagcaaatgttgcttaggaggtactgaatttcgaatcgaccgaaagcatagagattccatgttacttcctcaaacgccagttatcatatctacaaataatgatatctattctgtcgttggtggaaattcggttaatacagtacatgccaaaccgataagagaaagggtggtgcagtacaacttaatgaaacaattaccaccaacttttggagagatcacagtccaagaggtcgccgaatggctgctgacgtgtgcaactaactttccaatttcattggacggttttttgaatatttggaatttggaggcggtaccaaatgactttccgctcaataaattgtgtgcatctcacacacaggatttcattctgcatgaagttggtctatgctctgtttgcggcgggtatattcctcttgagcattctgatcgtagcgctgagcctgctataccatcaacttcgactgctgacggtgagttacctatgacatatcgacctaccttactttcggactttcaaagtgcaattgctgacttcgacttatttttattagcaacaccaccaactacaccgcggaaacggcgtttggattcagaagacgaacagccgtcgacatcgacaagtacacattcgtcttccacgaagcgccgcctttctgtcagcgaagaggtagcgtataagtgtgctgaatttttagataagtgggcatctcaaccacaagatgagtgcgaggagcaactcttcaacgaggagtggcgaggcatctgggggaatggaacggagcaggacacggagtcgaagcccgatccggcgcaacgagagctatcgccatcggaatggggtgaaattctcggagtccaaaaaagagctacagctgaggaggaaccactcgtcctctggtgcttcgagacgctcgaagacgacaaaaatgactccgtgggcggtgtttagtgagcatagagctaagacgggagcaggaattgggtattgtggcttttattatcatagtacaagattagccagagcaggtactgattggatttttaataaggggaaaccattatttcaatcaaaatgtacaaataatgtatgcgaatggtctgatgttagagaaatactgtttgattttaaaaaatggattgatcaaagctatcgaaacatgatgtggcattttaaacatggacaaccatgcgctaggtgtgcttattgggatgatgtatatggtcaacatttagctaatgtaaaacctgttcccatacaggacataagtgacgaggacatgctagaggcagccatggaagttgatggcgccaactaatcgtaaacctggtggttgggtaattcctggctatcgttatcttggtccgtttaactcgcttgataatggtgaaccaataaatgaggctgataaagctgctcgaaatcacgattttgcttatcaatcgtatatagacaaaggtcaaaatccgtatttgaattttaataaagctgatttacaatttatatctgatttgcgtaacgactggtcatttggaaccatcgttgggtccgcagtctttaaagcaaaacaagcaattgctccttcgttatcaaacgataacgagcgtcctggcacgtccaaacaagccatcgcagcagacagggctgctaaacgtaagttatattttgcgagatcgaatcgcaaaagtaaagtccctaaaatggataacacgaacgacaacaacgaccaaccagacggaggagacgatgtcatttctagacaaccaagagcagctggatcaggaggagggggacaatcaggcgctaattccggtggtggaagtggaggacatggagtgggagtcagcaccggcgggtggaaagcaggctgcgtcttcacagacagatatatcattaccaccaacactagacagtggttttgtccaatttacaatggacacaaatacacaaaaatggcctctgaaaaaaacaaccaaaatgggttcagcatgtgggaaggaatagcgacaccatggggtcactttaatttcaatgcatactctagtcatttttccccacaagactggcaacgtctcaccaatgaatataaacgctggcgactagtcaaaatgaacgtgaaaatctataatctacagatcaagcaaattgttacattgggtgcagacacactgtacaacaatgatctgacagcaggtgtgcatatattttgcgatggttcacatcaattcccatactcacaacatccatgggatgacggaactatgccggagcttcctaataatgtatggaagctaacacagtatgcatactaccaagacaaccgtgagctggtagacgaatccaaagatgaggtaacacctcttgacgttgaaaaaatgctacgtctagattctcctctgttcatactagaaagtgccactcatcaagtcctaagaacaggggaagaaactagctttaattttgacttcaattgtggctgggtatacaatgacagagcatatgctccaccacaggcagactataatccattgattacaactcgtaggctgtatgccacatggaattcgtctaccaatgagtacgtttacaaacgatatccaccgtattcaaaaccaagcacatggatgcctggtcctggattaggatacaaaggagacacagtaaatgaagcagaaccagcaaaagaacgcggtccagtagtagttacttacggaccaccaggcacacatagaaaaaatgaaaaaaacaacgagaatcaattccttccaacagaagatcacaccaaagaacacgctgtgcaacgaattggctactcagttgggcccgtcaatgatgcatgcagtggcatcgatctacatacgctagcttacgactcgagtgaatacagtaaatcagataaattcgttaccgtgcgcaacatcgacatcgaccttactcgatacaatgcatgcgaagtttacgacggagccactgtttcaagtaaagcgcgtctaaaaaatatttggatgtatccaaatcaagcatggaactccacaccaatctgcagagccaatcctatttgggtgaaaactccacgtacagaccatcatacactactggatacatcagatggaacactgccaatggaacatccacctggcattatttttgtcaaagtcgcaaaaattccagtacctaccgaaaacaattcagattcgtatctgaatctatacgtcacaggacgaattccatgtgaaatcctatgggaatgcgaacgctaccaaacaaaaaattggcgtccagaactacgcaactcagcaaatgcattcaaagaaggtggcctatacgacttcaactcagaaggagtctacaacacaccagaccacttctacgaatcaatgcccacaagatgcggaatcaaccgcgtactttaaacccatcaataaaccgtcaattcgtaaaccaaaagctgttcatatcactcgacaaat

SEQ ID NO: 203 - DNA, 4590 bp, Bearded dragon parvovirus
  source 1..4590: mol_type = genomic DNA; note = Bearded dragon parvovirus / Dependoparvovirus squamate 2 - NC_027429
ccccccttcccgacttctgcgcgcgtgcgctcgatcgtgggggagagcgagcgaagctcgctctgacgaccgcacttcgtgcggtcgcccccacgatcgagcgcacgcgcgcagaagtcgggaaggggggccagacactcggttgcatactacgttttgcccacgtgacccagcccccataaaagcaagtagcgcgagcgccgaaggcgcgaagcgcatgggtggtcgccgcgcgcccacccctgggtcacgcccatatgcaaatgagctgccgcaaggcatgatggttaatgacgcgttctctcactgtaagtcagaacaatattataaatagtagagacccgtcttttttcagccattttcattcgccgaacctagcgtcaagatgccgtacgagatgatcttccgcgttcccaaagaagatgaagatgcgtggtgtgaagataacgacaggtacgaagcccgtctggcagaaggtgacgattggccacaagaacgtttagaagaagacgaccggtggtttgtaaatctatgttacgctgctcggggaattttcaaaaaatattttggaaaatcccttacctattttatgcaagtagaatggagtccagccgatggtcatcacatgcattgtgtccttgatgatccaaagttaaaagccaataattataattaccatctggatcagctgtctatgaaaatgaaaacagaatttaaatggaaaagtgccaatatgctacaaaagagtgtgcaacgagcagccaatcggcatttaaagctccggtactgccagttcgaaagctatataaagaactacttttacaagaaagaggtcatttcaccggaagaagagcaaccgaacggagactttgagcgagttcgtgattgcgtcctgtgggcctttaccaatctggacaactggaagccgtcggtaagaaacattatcctacgaaatcaactaaaagccccagatcaagtgacgaccgttccgggaggacctaaacctagacaaggagccaacgtcgaagccttcatggaaaccattgactggttagtgaaaaatggcattaccactgaacgtcagttttgtcaagccaatcgaacattgtatctatcgatgctagctaccaattctggagctggtcaaattaaacgagctctagaacaagcgaagcacatgatgcaatcgaccatgacagcggctgattacttaacccgggaagaacgtgtggagacatgttccgaaaccaacagaattcgagtcatcatggaaaagaacggatacgaccctctcctggctgccaacatctttaacggttggttgaacaaggaatacggaaaaaggaataccatctggctctacggaccagctaccaccggaaagactattatagcgcaagctatagcccacggtgctgtcctctttggaggagtcaattggactaatgaaaactttcccttttgtaattgtcctggtaaactgttgatatggtgggaagagggtaaaatgacacaaaagatggtcgaaaccgccaaatgtatattaggcggtgctgttgtacctgtggatatcaaaggcaaaatggctgaactgtgtgaaaccacccctgtcattattaccagtaataccaacatgtgtcaggtctttgatggtaacagtagcagttttgaacataccgaacccttagaagaaagaatgtttatgtttaggttgaataagaaactggaacctgattttggaaaagtgaccttggacgaagtcaaagaatttattacctggggtagagataatccagtacaagtaccgtatcagtttcgagtaccctctgtagccacgccccctcagaaaagtataaatgaggtgctgggcaagcgccgcgccatttctgacggcgcgggcgaagagacgagatcgaccaagttggtgctgctgaatgattctctaaccaggtattgtaacaatattactgaacgtgtcaatacgcgtgaaattgctcaaaataatcaatgtatgttacaccacgtctttaattgttctgaatgttaccctgaattgttggatgattgtgacatggaacaataaatgattgaaatatagctatggattttctcgatttcttgttaggtgaaaaatacgaggagactgctaaagagttgggaaaaccgattaaccctcctcccgttcaacaaattagccacgcagacagcagacgcggtctagtggttccaggttataaatacctcggtccattcaacggattagacaagggcgagcctgtcaacgcagctgacgcggctgcccttgaacacgacaaagcttataacgagcttctcgaggctggagacaacccgtacatcaagtacaaccacgcggacgccgtctttcaagaacgcttgcaaggagatactagtttgggtggtaacgcggctaacgcggtttttcaattcaagaagcggttgctcgagccgtttggagcggtcgagcagccccagcccgaaaagacggccgaaaagcgaaagacacccgaagagtggttagctcaagaaaagactccaaccaaacaaaggttccagataccagctccaggacaatctggatcagattctccttccacctcaggatccggcggtactgcaggctccagttctagcgcatcaaatacaatggctcaaggaggtggcggaccaatggcagacgataaccaaggcgccgagggagtgggtaatgcctcgggagattggcattgcgatacccaatggctgggcgaccacgtcattacaaaatctaccagaacttgggttctgccctcttacgggaatcatctctactcgcccatcaactttgatggaaccacagggaacggaacccaagccgcttactgcggatacgctaccccctgggcctactttgactttaaccgattccactgccacttttccccccgagactggcaaagactcattaacaaccataccggaatacgaccagtcggactcaaattcaagctgttcaacatccaggtcaaggaaatcacagtacaagattcgaccaaaacgatcgccaacaatctcaccagcaccgtacaggtctttgcggacacggagcaccagctcccgtacgtattaggaaatgccacgcagggcacgtttcctccctttccggctgaagtctttcagttgcctcagtacggctactgtaccatccaaggccctcagggtaagtttaccgacagaagtgccttctactgcttggagtactttccttccaagatgctgagaacggggaataactttgaatttacttacaagttcgagaaggttcccttccattctggctgggctcaaagccagtcgttggatcgattgatgaatcccttgatcccacagtacctgttggccgattatggtacgaccgccagtagtgccataacatactatcggccaaacagcacagacttgagctggtactttaaaaactggctgcctgggccagtggaaaggcgacagcaaatcaattctgaagactcgacgaaaaaccatgccaatttgaacgggaatgcacacaccaacaaatacagcatccagcacagacaaaccaagatgatgccaggggtggctctcagtagtaaatacacaggtgctgctgaaggaacgtcgttactgaacggggtattgacctttgataagatcgccaatgacaatactaacatcacggatacaaataatgtcaatcggacgatcgaagatgaaattcaaggtaccaatccttatggaaacgacgtacccattaccgtcgctgtcaatacacaaaacgcgaccacttctcctaccatgcaaaacagcagcacgtatgaactattacctggtgctgtctggtccaacagagatatttacctgcaaggtcccatctgggctaaaatacccgataccgatggacactttcacccgtctccacaaatgggtggtttcggacttaaaaacccaccaccgatgatcctcatcaaaaacacacccgttcccgccgatccaccaacgaccttcaaaccgactccgatgaacagcttcatcagcgaatacagtaccggtcaggtgactgtagagatgctgtgggaggtccggaaagaagactccaagagatggaacccggaaatccagtttacctccaattttggattgtccgatcctcagatcgacggtataccctttggtattaccaaattgggtaattacgaggaaccacgtcctattggctcacgttatctgtctaagcatttgtaaataaaaattgtcacattttgtaccggatatccgcttacgtgttttattttccgggatgggcgtgacccaggggtgggcgcgcggcgaccacccatgcgcttcgcgccttcggcgctcgcgctacttgcttttatgggggctgggtcacgtgggcaaaacgtagtatgcaaccgagtgtctggccccccttcccgacttctgcgcgcgtgcgctcgatcgtgggggcgaccgcacgaagtgcggtcgtcagagcgagcttcgctcgctctcccccacgatcgagcgcacgcgcgcagaagtcgggaagggggg

SEQ ID NO: 204 - DNA, 5027 bp, Bocaparvovirus lagomorph 1
  source 1..5027: mol_type = genomic DNA; note = Bocaparvovirus lagomorph 1 - NC_028973
gctttcatcaaagccgccgaagaagctttccgcttctggttcgcggacaaacagatcaccgcgaatccgacgtacgacttcttcgcgcaagccgaactgtcgggagagaaccagtggaactttgaaaacaacggagacttcagaccgcacgtccactgcatcgtgtccggcaaggggctgacgcgcttcacggctaagtctatgcgtctcgatgtagaaaagagatggatcgcgtgcctggtgatggcggctaaacagaccgggctcgcggaactgccggaagaacaggggccgtggaaagtgctggtcagagagctcgacatggcggcggatgaggtgctggacggcagaatgcactgctctcgcatcctgcagtatcgctctcgcgccgggcagtatcacgcgctcagagtagacgccagagaattcatcactaactacttcctgcctaaaaatctgctgtggaacagacagctatctgtcaaccaagcgacgccgggcaacagctggtttcagcagagctacaagtgctacgctctctcctacatcaacgaaaagttcatcagctactggagacgccggcatctctacgaacggctggccaactctgtgctgacgcgcacgcagagcgagccggtggctagcggcagcgagacggtctcgcttcctgaggtaagtgttcagcgctttaaactagacaaagaaccggatccggaacaacgcatgaacaaaaagcaagcgatgatgctagacgcggtacagagaagcacgcacaatcactggctcacctacgaagacatggtccgcggggctccggaacttctcatcatgctagagagtcagccgggcggcaacaaactcatcgaacagctgctccagatggtccacatcagcatcacgcaaaagtacacagcgcttgagtacatcctggcacgacatccgatgactcagcctgaccagctgtctcctgacaacaagattgtgcaactgcttaacttccaaggatacaacgcctggcaaacgggacactggctctgcgtctggctcagcaagagagccaacaaacaaaacacgatctccttctttggtccagccagcaccggcaagacaaacttggccaaatctgtggtcaactgcgtcaagctctacggctgcgtcaatcatctcaacaaaaactttgtctttaacgattgcgctgccaaactagtactctggtgggaagaatgtctcatgaccacagactgggtcgagccggcaaaatgcattctcggcggcacggaaacgcgcatcgatcgaaaacacagagaaagccagcttctaccgcacacgccggtcatcatctcgaccaacaacgacatctacacggtcgtgggcggcaacgtcacacacggagtccacgctacgcctctcagagctcgcatcgtgcaattcaatctcatgaagatgcttcctcagaccttcggagaaatcactacggaagaatgcgcagcctggctcactgcctgttacgcgcgcttcaaagaccacatttctctgcaaggcttttgcgacatctggcggcttaaacaggtaccgcacagctttcctaaccagagtctttgtccttctcacacacaggactttgtgctgcacgagcacggactgtgcctatcgtgtggaggttacctgcctttgcgaagatcgccagagccggagccagtccagcaggcatcccacgtcgactgggacgagatcgacgcccggtggctcggtgagttacctactatggatgcctggtcgccagatacacaagactgggactggctcgattccgagtctacgctctcggcacctgactctccttctctcttgtcaggaagaccttccggacggcagagtcctgatacagccacaccggatcctactcctccggcgcggccaaacactccagttgaacccggcgaaccggatcaacaggtacctattatcgatctcaccggcacagacgtctcctcggacgacgagacagactgtgacgaggaggctgcgcgagtggctgcatcgcgtctgcgggaactcgccgaacaactaaacaatgagttcgcgtcacagcccgtatccgaggaagacatccggcgatacgaccggctccaagacgagctgggcatcatcaggcagcagggagaacaaggggaaccacaagaacccatcgttctccactgcttcgagaccattcctgactcgccagcagaagaaggagatcctcaagcctagagccttgagaaaagatcctcctaaagtcttttgcgctacacatcgagcggacagtccggacgctccggctgtctgcggcttcttttggcactctaatcggattgcgggcaaagggactgattggatctttacgcggggcaaacaattatttcaggaacgggcaaaaaataatgttatcgattgggacatggcgcgggatttgttgttttcatttaagcgggagtgtgatcagtggtaccgtaatatgttgtatcatttcagattgggagaaccctgtgacaaatgtaattactgggacggggcttatcgcaaatactgtgcgcgcgttaatgcagactatgaaaaagaaataaatgctacttctgcttcacaggaactcactgacgaagaagcggccgctgcactagacgcggccatggccgatgcctcccattagacaacctaaagggtggctctttcctgggtatcgctatttgggtcctttcaatcctagcgataacggggaacctgtcaacgcggctgacaaagcagctcaaaaacacgatcaatcctataatcactatattaatcaaggacacaatccttacttgtatttcaataaagctgatcaacagtttcttgacgacttgcgtggtgattggtccgccggagcactagcgggcaaagcagtctttggggtcaaaaaggccatcgcgcctgcacttggtgaaaaaaaaacggctccgggagccggaggaggacctccggcaaaacaagccaaagtccaagctgctaagcgcaagctttattttgctcgaagcaataagggagctaaacaagctaaaatggcagatagtaacgaagtggaaggtgcgggagacggacctccggaagaacaaccaagtacttccggaggagcgccagctcctagcatggtcgatgctaggtcaggctctggcggaggcgggggaggcggcatgggcgggggaggcagtgtaggcgtcagcacgggaggctgggaaggaggcacgcacttccacgcaaacggcgtcactaccgtcgtcaccagacaatggtacgctcgcgcattcaataaccacacctacagcacactctccagcaacaacctcagcctcaacaacgatccagcttggatcggcattcaaacaccgtggggctactttaactttaactgctatcgctgccactttagccctaatgactggcaacgcctgaccaacgaatacgtgcgatggagaccaacgtccatgcacgtcaaaatttacaacctacaaatcaaacaaattgtctccttgggcaacgatacactttacaacaatgacctaactgccggagtgcacatcatgtgtgacggcagtggtcaataccctgactctgccaacggctgggatgaacagctcctaccagaaattccaacagacatatacacactaccacaatacgcatactatcaagccaacggagacctagtctccgacggaggcgcaaacaccgtcaacaacagcacagaaagacacattctagccaatgtaccgctattcatgctagaaacatcacatcaccaagtactcagaacaggagaatctacagaaatgcgattctccttcagctgtggctgggtcaaaaatgaccgaacctatcaacctccacaagcaggattcaatccattggtaggcacacgcagaaaggctccacaactcactgtacgtgcaggaaatgcttatgagtggtcctccagtaactactcaccctataaaaaaccaagtatttggatgccaggacctggctattgccgacaaggatggacacgcgctacaggacacaactaccaagacggcgtccgaggaccatggtgggtcgcatacgctcccacaggaagccaaccagaaggcgttatccaatacgcaaacaactacatcggcacacaatacatcaacgaagacagcgtgcgtacctacggatacgccatcaatcctgcaggaggcgcttccaacgccatgcacgacaaagacgtgcaattcaacgtcaaccgagaacaagaccaaggcaactcagctaacgtactcagcaccgaagaaattgattttactcgctggtacaatgctggcttcgtgcaaaactccggaggcaacgatccacaaaacaacaacgcacaatgggcttaccaaaacgtcatctacatgtacccaaaccaactatggaacggaccgacactgtcaagagaaaatccaatctggacacgagtacctcgcaccgactttaaaaccatcctcgactgcgaagacggaaccctacctatggaacatcctccgggaaccatctacgtcaaagtctctaaaatcccaattccatccgacaccgctaatccatcttttcttaatctctacgtcacaggacaaatcaccgtcgccatcgagtgggaagccgaacgctactccacaaagaactggcgaccagaaacacgcacttctgcaaccaacttcaacaaaacaaacgtctacaactttgatgaccaagggagatacatcattccagacgaatacaaccaatgcatgccaaccagacaaggcatgacacgtgtcactaaacaccaataaaattgcgttgtatccttcatgggcgtggcttattttctttatgggtaccatatcttctttaacagcacctagtgtacaacgtcactaagtgctgatgtaggactttgtcatacgtcaggtatgacttaattctgtcatccgaccacaagtacatatgacaagtacttgtcatgatac

SEQ ID NO: 205 - DNA, 5299 bp, Bocaparvovirus primate 1
  source 1..5299: mol_type = genomic DNA; note = Bocaparvovirus primate 1 - NC_007455
gccggcagacatattggattccaagatggcgtctgtacaaccacgtcacatataaaataataaatattcacaaggaggagtggttatatgatgtaatccataaccactcccaggaaatgacgtatgatagccaatcagaattgagtattaaacctatataagctgctgcacttcctgattcaatcagactgcatccggtctccggcgagtgaacatctctggaaaaagctccacgcttgtggtgagtctactatggctttcaatcctcctgtgattagagctttttctcaacctgcttttacttatgtcttcaaatttccatatccacaatggaaagaaaaagaatggctgcttcatgcacttttagctcatggaactgaacaatctatgatacaattaagaaactgcgctcctcatccggatgaagacataatccgtgatgacttgcttatttctttagaagatcgccattttggggctgttctctgcaaggctgtttacatggcaacaactactctcatgtcacacaaacaaaggaatatgtttcctcgttgtgacatcatagttcagtctgagctaggagagaaaaacttacactgccatattatagttgggggagaaggactaagcaagaggaatgctaaatcatcctgtgctcagttctatggtttaatactagctgagataattcaacgctgcaaatctcttctggctacacgtccttttgaacctgaggaggctgacatatttcacactctaaaaaaggctgagcgagaggcatggggtggagttactggcggcaacatgcagatccttcaatatagagatcgcagaggagaccttcatgcacaaacagtggatcctcttcgcttcttcaaaaactaccttttacctaaaaatagatgtatttcatcttacagcaaacctgatgtttgtacttctcctgacaactggttcattttagctgaaaaaacttactctcacactcttattaacgggctgccgcttccagaacattacagaaaaaactaccacgcaaccctagataacgaagtcattccagggcctcaaacaatggcctatggaggacgtggtccgtgggaacatcttcctgaggtaggagatcagcgcctagctgcgtcttctgttagcactacttataaacctaacaaaaaagaaaaacttatgctaaacttgctagacaaatgtaaagagctaaatctattagtttatgaagacttagtagctaattgtcctgaactactccttatgcttgaaggtcaaccaggaggggcacgccttatagaacaagtcttgggcatgcaccatattaatgtttgttctaactttacagctctcacatatctttttcatctacatcctgttacttcgcttgactcagacaataaagctttacagcttttgttgattcaaggctataatcctctagccgttggtcacgccctgtgctgtgtcctgaacaaacaattcgggaaacaaaacactgtttgcttttacgggcctgcctcaacaggtaaaacaaatatggccaaggcaatcgtccaagggattagactttatgggtgtgttaatcatttgaacaaaggatttgtatttaatgactgcagacaacgcctagttgtttggtgggaggagtgcttaatgcaccaggattgggtggaacctgcaaagtgtatcttgggcgggacagaatgcagaattgacgtcaagcatagagacagtgtacttttaactcaaacacctgtaattatatccactaaccacgatatctacgcggttgttggtggcaattctgtttctcatgttcacgcggctccattaaaagaaagagtgattcagctaaattttatgaaacaacttcctcaaacatttggagaaatcactgctactgagattgcagctcttctacagtggtgtttcaatgagtacgactgtactctgacaggatttaaacaaaaatggaatttagataaaattccaaactcatttcctcttggggtcctttgtcctactcattcacaggactttacacttcacgaaaacggatactgcactgattgcggtggttaccttcctcatagtgctgacaattctatgtacactgatcgcgcaagcgaaactagcacaggagacatcacaccaagtaagtaaatacgcatgcgcaagtaattcttttactttcacttcgctatttttaccaatttttacttttaggtgacttgggggattcggacggagaagacaccgagcctgagacatcgcaagtggactattgtccacccaagaaacgtcgtctaactgctccagcaagtcctccaaactcacctgcgagctctgtaagtactattactttctttaacacttggcacgcacagccacgtgacgaagatgagctcagggaatatgaaagacaagcatcgctcctacaaaagaaaagggagtccagaaagaggggagaggaagagacactggcagacaactcatcacaggagcaggagccgcagcccgatccgacacagtggggagagaggctcgggctcatatcatcaggaacacccaatcagccacctatcgtcttgcactgcttcgaagacctcagaccaagtgatgaagacgagggagagtacatcggggaaaaaagacaatagaacaaatccatacactgtattcagtcaacacagagcttccaatcctgaagctccagggtggtgtgggttctactggcactctactcgcattgctagagatggtactaattcaatctttaatgaaatgaaacaacagtttcaacaactacaaattgataataaaataggatgggataacactagagaactattgtttaatcaaaagaaaacactagatcaaaaatacagaaatatgttctggcactttagaaataactctgattgtgaaagatgtaattactgggatgatgtgtaccgtagacacttagctaatgtttcctcacagacagaagcagacgagataactgacgaggaaatgctttctgctgctgaaagcatggaagcagatgcctccaattaagagacagcctagagggtgggtgctgcctggatacagatatcttgggccatttaatccacttgataacggtgaacctgtaaataacgctgatcgcgctgctcaattacatgatcacgcctactctgaactaataaagagtggtaaaaatccatacctgtatttcaataaagctgatgaaaaattcattgatgatctaaaagacgattggtcaattggtggaattattggatccagtttttttaaaataaagcgcgccgtggctcctgctctgggaaataaagagagagcccaaaaaagacacttttactttgctaactcaaataaaggtgcaaaaaaaacaaaaaaaagtgaacctaaaccaggaacctcaaaaatgtctgacactgacattcaagaccaacaacctgatactgtggacgcaccacaaaacacctcagggggaggaacaggaagtattggaggaggaaaaggatctggtgtggggatttccactggagggtgggtcggaggttctcacttttcagacaaatatgtggttactaaaaacacaagacaatttataaccacaattcagaatggtcacctctacaaaacagaggccattgaaacaacaaaccaaagtggaaaatcacagcgctgcgtcacaactccatggacatactttaactttaatcaatacagctgtcacttctcaccacaggattggcagcgccttacaaatgaatataagcgcttcagacctaaagcaatgcaagtaaagatttacaacttgcaaataaaacaaatactttcaaatggtgctgacacaacatacaacaatgacctcacagctggcgttcacatcttttgtgatggagagcatgcttacccaaatgcatctcatccatgggatgaggacgtcatgcctgatcttccatacaagacctggaaactttttcaatatggatatattcctattgaaaatgaactcgcagatcttgatggaaatgcagctggaggcaatgctacagaaaaagcacttctgtatcagatgcctttttttctacttgaaaacagtgaccaccaagtacttagaactggtgagagcactgaatttacttttaactttgactgtgaatgggttaacaatgaaagagcatacattcctcctggactaatgtttaatccaaaagtcccaacaagaagagttcagtacataagacaaaacggaagcacagcagccagcacaggcagaattcagccatactcaaaaccaacaagctggatgacaggacctggcctgctcagtgcacaaagagtaggaccacagtcatcagacactgctccattcatggtttgcactaacccagaaggaacacacataaacacaggtgctgcaggatttggatctggctttgatcctccaaacggatgtctggcaccaactaacctagaatacaaacttcagtggtaccagacaccagaaggaacaggaaataatggaaacataattgcaaacccatcactctcaatgcttagagaccaactcctatacaaaggaaaccaaaccacatacaatctagtgggggacatatggatgtttccaaatcaagtctgggacagatttcctatcaccagagaaaatccaatctggtgcaaaaaaccaagggctgacaaacacacaatcatggatccatttgatggatcaattgcaatggatcatcctccaggcactatttttataaaaatggcaaaaattccagttccaactgcctcaaatgcagactcatacctaaacatatactgtactggacaagtcagctgtgaaattgtatgggaggtagaaagatacgcaacaaagaactggcgtccagaaagaagacatactgcactcgggatgtcactgggaggagagagcaactacacgcctacataccacgtggatccaacaggagcatacatccagcccacgtcatatgatcagtgtatgccagtaaaaacaaacatcaataaagtgttgtaatcttataagcctcttttttgcttctgcttacaagttcctcctcaatggacaagcggaaagtgaagggtgactgtagtcctgagctcatgggttcaagaccacagcccgatggtagtggtgttaccgtctcgaacctagccgacagcccttgtacattgtggggggagctgttttgtttgcttatgcaatcgcgaaactctatatcttttaatgtgttgttgttgtaca

SEQ ID NO: 206 - DNA, 5543 bp, Bocaparvovirus primate 1
  source 1..5543: mol_type = genomic DNA; note = Bocaparvovirus primate 1 - NC_075120
gtggttgtacagacgccatcttggaatccaatatgtctgccggctcagtcatgcctgcgctgcgcgcagcgcgctgcgcgcgcgcatgatctaatcgccggcagacatattggattccaagatggcgtctgtacaaccacgtcacatataaaataataaatattcacaaggaggagtggttatatgatgtaatccataaccactcccaggaaatgacgtatgatagccaatcagaattgagtattaaacctatataagctgctgcacttcctgattcaatcagactgcatccggtctccggcgagtgaacatctctggaaaaagctccacgcttgtggtgagtctactatggctttcaatcctcctgtgattagagctttttctcaacctgcttttacttatgtcttcaaatttccatatccacaatggaaagaaaaagaatggctgcttcatgcacttttagctcatggaactgaacaatctatgatacaattaagaaactgcgctcctcatccggatgaagacataatccgtgatgacttgcttatttctttagaagatcgccattttggggctgttctctgcaaggctgtttacatggcaacaactactctcatgtcacacaaacaaaggaatatgtttcctcgttgtgacatcatagttcagtctgagctaggagagaaaaacttacactgccatattatagttgggggagaaggactaagcaagaggaatgctaaatcatcctgtgctcagttctatggtttaatactagctgaaataattcaacgctgcaaatctcttctggctacacgtccttttgaacctgaagaggctgacatatttcacactttaaaaaaggctgagcgagaggcatggggtggagttactggcggcaacatgcaaatccttcaatatagagatcgcagaggagaccttcatgcacaaacagtggatcctcttcgcttcttcaaaaactaccttttacctaaaaatagatgtatttcatcttacagcaaacctgatgtttgtacttctcctgacaactggttcattttagctgaaaaaacttactctcacactcttattaacgggctgccgcttccagaacattacagaaaaaactaccacgcaaccctagataacgaagtcattccagggcctcaaacaatggcctatggaggacgtggtccgtgggaacatcttcctgaggtaggagatcagcgcctagctgcgtcttctgttagcactacttataaacctaacaaaaaagaaaaacttatgctaaacttgctagacaaatgtaaagagctaaatctattagtttatgaagacttagtagctaattgtcctgaactactccttatgcttgaaggtcaaccaggaggggcacgccttatagaacaagtcttgggcatgcaccatattaatgtttgttctaactttacagctctcacatatctttttcatctacatcctgttacttcgcttgactcagacaataaagctttacagcttttgttgattcaaggctataatcctctagccgttggtcacgccctatgctgtgtcctgaacaaacaattcgggaaacaaaacactgtttgcttttacgggcctgcctcaacaggtaaaacaaatatggccaaggcaatcgtccaagggattagactttatgggtgtgttaatcatttgaacaaaggatttgtatttaatgactgcagacaacgcctagttgtttggtgggaggagtgcttaatgcaccaggattgggtggaacctgcaaagtgtatcttgggcgggacagaatgcagaattgacgtcaagcatagagacagtgtacttttaactcaaacacctgtaattatatccactaaccacgatatctacgcggttgttggtggcaattctgtttctcatgttcacgcggctccattaaaagaaagagtgattcagctaaattttatgaaacaacttcctcaaacatttggagaaatcactgctactgagattgcagctcttctacagtggtgtttcaatgagtacgactgtactctgacaggatttaaacaaaaatggaatttagataaaattccaaactcatttcctcttggggtcctttgtcctactcattcacaggactttacacttcacgaaaacggatactgcactgattgcggtggttaccttcctcatagtgctgacaattctatgtacactgatcgcgcaagcgaaactagcacaggagacatcacaccaagtaagtaaatacgcatgcgcaagtaattcttttactttcacttcgctatttttaccaatttttacttttaggtgacttgggggattcggacggagaagacaccaagcctgagacatcgcaagtggactattgtccacccaagaaacgtcgtctaactgctccagcaagtcctccaaactcacctgcgagctctgtaagtactattactttctttaacacttggcacgcacagccacgtgacgaagatgagctcagggaatatgaaagacaagcatcgctcctacaaaagaaaagggagtccagaaagaggggagaggaagagacactggcagacaactcatcacaggagcaggagccgcagcccgatccgacacagtggggagagaggctcgggctcatatcatcaggaacacccaatcagccacctatcgtcttgcactgcttcgaagacctcagaccaagtgatgaagacgagggagagtacatcggggaaaaaagacaatagaacaaatccatacactgtattcagtcaacacagagcttccaatcctgaagctccagggtggtgtgggttctactggcactctactcgcattgctagagatggtactaattcaatctttaatgaaatgaaacaacagtttcaacagctacaaattgataataaaataggatgggataacactagagaactattgtttaatcaaaagaaaacactagatcaaaaatacagaaatatgttctggcactttagaaataactctgattgtgaaagatgtaattactgggatgatgtgtaccgtagacacttagctaatgtttcctcacagacagaagcagacgagataactgacgaggaaatgctttctgctgctgaaagcatggaagcagatgcctccaattaagagacagcctagagggtgggtgctgcctggatacagatatcttgggccatttaatccacttgataacggtgaacctgtaaataacgctgatcgcgctgctcaattacatgatcacgcctactctgaactaataaagagtggtaaaaatccatacctgtatttcaataaagctgatgaaaaattcattgatgatctaaaagacgattggtcaattggtggaattattggatccagtttttttaaaataaagcgcgccgtggctcctgctctgggaaataaagagagagcccaaaaaagacacttttactttgctaactcaaataaaggtgcaaaaaaaacaaaaaaaagtgaacctaaaccaggaacctcaaaaatgtctgacactgacattcaagaccaacaacctgatactgtagacgcaccacagaacacctcagggggaggaacaggaagtattggaggaggaaaaggatctggtgtggggatttccactggagggtgggtcggaggttctcacttttcagacaaatatgtggttactaaaaacacaagacaatttataaccacaattcagaatggtcacctctacaaaacagaggccattgaaacaacaaaccaaagtggaaaatcacagcgctgcgtcacaactccatggacatactttaactttaatcaatacagctgtcacttctcaccacaggattggcagcgccttacaaatgaatataagcgcttcagacctaaagcaatgcaagtaaagatttacaacttgcaaataaaacaaatactttcaaatggtgctgacacaacatacaacaatgacctcacagctggcgttcacatcttttgtgatggagagcatgcttacccaaatgcatctcatccatgggatgaggacgtcatgcctgatcttccatacaagacctggaaactttttcaatatggatatattcctattgaaaatgaactcgcagatcttgatggaaatgcagctggaggcaatgctacagaaaaagcacttctgtatcagatgcctttttttctacttgaaaacagtgaccaccaagtacttagaactggtgagagcactgaatttacttttaactttgactgtgaatgggttaacaatgaaagagcatacattcctcctggactaatgtttaatccaaaagttccaacaagaagagttcagtacataagacaaaacggaagcacagcagccagcacaggcagaattcagccatactcaaaaccaacaagctggatgacaggacctggcctgctcagtgcacagagagtaggaccacagtcatcagacactgctccattcatggtttgcactaacccagaaggaacacacataaacacaggtgctgcaggatttggatctggctttgatcctccaagcggatgtctggcaccaactaacctagaatacaaacttcagtggtaccagacaccagaaggaacaggaaataatggaaacataattgcaaacccatcactctcaatgcttagagaccaactcctatacaaaggaaaccagaccacatacaatctagtgggggacatatggatgtttccaaatcaagtctgggacagatttcctatcaccagagaaaatccaatctggtgcaaaaaaccaagagctgacaaacacacaatcatggatccatttgatggatcaattgcaatggatcatcctccaggcactatttttataaaaatggcaaaaattccagttccaactgcctcaaatgcagactcatacctaaacatatactgtactggacaagtcagctgtgagattgtatgggaagtaaaaagatacgcaacaaagaactggcgtccagaaagaagacatactgcactcgggatgtcactgggaggagaaagcaactacacgcctacataccacgtggatccaacaggagcatacatccagcccacgtcatatgatcaatgtatgccagtaaaaacaaacatcaataaagtgttgtaatcttataagcctcttttttgcttctgcttacaagttcctcctcaatggacaagcggaaagtgaagggtgactgtagtcctgagctcatgggttcaagaccacagcccgatggtagtggtgttaccgtctcgaacctagccgacagcccttgtacattgtggggggagctgttttgtttgcttatgcaatcgcgaaactctatatcttttaatgtgttgttgttgtacatgcgccatcttagttttatatcagctggcgccttagttatataacatgcatgttatataactaaggcgccagctgatataaaactaagatggcgcatgtacaacaacaacacattaaaagatatagagtttcgcgattgcataagcaa

SEQ ID NO: 207 - DNA, 4835 bp, Bocaparvovirus primate 3
  source 1..4835: mol_type = genomic DNA; note = Bocaparvovirus primate 3 - NC_055583
ctatagtcatcgcgaagaggatcttcctgcttagttcattctgcttccggcattcggcgagtgaacatctcttgagaatatcctgctgttggtgagtctacaatggcctattcactgcctgtgataagagccttttctcaacctgcctttacttatgtagttagatttccatgggaaaattggaaagaagatgagcaggctatttgcagccttctatctccgggtttaggcgattgcatagacaggctcaaatcatgcaagcctcaaccagaggaagatcctcttcgcgatgacttgcttgaaagtattggtgaccagcatccgcttgcaattatagccaaggcctgctataaggcgatgttaccattatgggtcaaaagcaacacactatcatgccgagatgtgatatcatcatcagtcagaactggacataagtttattcattgtcacgtgatagttggaggtgctggattaagtaagcggaatgctaagatcattaagagtagtattcttgctgaatttgttggagagctgatatatcgctgcagagaacgtctgagccaaagacctttcgatccggacgagtctgctatctttcacaatctgaaacgcgttcagagagaggcctggtctggacattgtggtggtcttgtggacatcttgcaataccgcgacagacgaggggagttacacgctcagtcaattgatcctttgcgcttttttgccaactatctccttcctaaaaacaaaaatatatcatgtaacactacacctgatatttgcacgcctgctgataactgggttattctagttgaaaaaacatacgggcacactcttgtaaacgggctatcactacctgctagacagcgtactgcttacagaacagagctttctaacgaggtgattggagggcctgcagcaatgaattttgggggtcgtgctgcttgggaagaacttcctcaggtaggagagcaacgattagttgccagtacttcttctactgaatacaaggcaaataaaaaagaaagattaatgcttaatttgcttgaaaaatgtaaggatttaaatttattaacctatgaagatcttgtttctaattgtcctgatttgcttcttatgctggaggggcagccgggtggagcgcgcctaattgaacaggtgctaggcatgcatcatatcaaagtttgctcagaatttactgctcttaaatttttattgcacttacatccgggagctgctttacttagtgataacaaggcaattaaacttttattacttcaaggatataatccacttcaagtcgggcatgccttatgctgtatcctagataagaagtttggcaaacaaaacactgtttgtttttatggtcctgcatctactggtaaaacaaatttagcaaaggcgttggttcaagcaattcgattatatggaaatgttaatcacttaaacaaagggtttgtgtttaatgattgtagacaacgccttgtaatttggtgggaggaatgtttaatgcaccaggattgggtggaacctgcaaagtgtattcttggcgggactgaatgcaggattgatgttaaacatagagacagtgttttgttaactcagactccggttgttatctctaccaatcatgatatttacactgtagtgggtgggaacactgttagccaggtgcatgctgctcctttgaaagagcgggttgtgcagttgaattttatgaaacaacttcctcaaacttttggagagataactgctgaagagattgctggcttacttcgcttttgcttcgagcagttcagctgcaatttgaatgactttaaaaataaatggaatttggagagagttccaaattcgttccctcttggaaaactgtgtcctgcgcattcacaggacttcatcctccacgaaaacggattctgtactgagtgcggtggctatttgcctcacagtgctgataacagtatatatactgaagatactagcaactccggagactccaccgtcggtaagtgtttttaacatgtgcaatacactgtgttgttatatgtgttactcataatataatttattgcaggtgacgtgggggattcggacagagaggactccgagtcagaagcatcggaggtggatcctagtccacccaagaggaggcgcctagctacgccggtgagttttgctgaatttgttgaaacttggagctctcaacccagagacgaagatgagctcagaatctacgaaagccaggcatcgcgcgtcgaaacgctctccgagtccattgaagttggagcggaagaggaattgggaccagaaacggaggagccgcagcccaatccatcggaatggggagaaaaacttggcgtcatcagctcctcaacgcctggagaaaaaccaatcgttctctactgcttcgaagacctcagagacagcgacgacgacgagggagtcaacgtcgggggggaataagactaatccttacactgtattcagtcggcatcgggctgctaatcctgatgcgcctgggtggtgtggtttttactggcattctactcgtattgcacgtgatgggaccaatgaaatatttaatcgttgtaagcaacagtttcaagagctgcaggttgataataaacttgattgggacggggttaaagaaattctgtttgctaataaaaaaataatggatcagaaatacagaaacatgttctggcacttcagaaacatgccagattgtaacagatgtgattactgggatgatgtatacagaatgcatttagctaaagtgtcttcgcaggttccagacgtttctgacgaagaaatgcttgctgctgctgaggtcatggactctgatgcctccaattaaaaggcagcctggtggttgggtgttacctggttataaatatcttggaccatttaatccaattgataacggagaacctgtaaacgctgctgattctgctgccaaaaggcatgatatttcatattcaaatttaataaaatctggttataatccttacttatattttaataaagctgatcaacagtttattgacgatttaaaaaacgattggtctgttggtggtattattggctcaagtttttttaaaataaaaaaagctgtggctcctgcacttagtaataaagagcgagcgcaaaaaagacacttttattttgcaaactctaataaaggctcaaaaaaaacaaaacttgcgctcgataaaccatctacgaaaaaaatgagcgatgctgctgctgcaaatcaagaagagctgcctcaagatatgcctgacggtcgccagggaaatggcgcgggcggtggggttagcggtggccgcggatctggagtggggatatccactggtggatgggtgggaggatctctatttggagataatatgattataacaaaaaacacaagacaattcctggtggaaattaaaaataatcatttatacaaaaatgaaacaattggtggaaaccctgctcctgtccagtgtgtatcaactccgtggagctattttaactttaatcaatacagctctcacttttcgccacaagactggcagcgtttgacaaacgagtacaaacgcttcagacctaaacatatgtctgtgaaaatctataatttgcaaatcaaacaaattctctcaaatggagcagataccacgtataacaatgacttgactgcgggcgttcacatcttttgtgatggcgaacacgcttatccaaatgcttctcatccttgggatgaggatgtgatgcccgagcttccataccaggtctggcgtttgtttcaatacgggtacattcctgctatcagccagttaattgacatggaagactcaaatgcagtggaaagagctattcagaggcagatgccttttttcattcttgaaaacagtgaccatgaagtgctcagaaccggtgaaagcaccgagtttactttcgattttgaatgtgaatgggttaacaatgaacgcgcatacattccacctggtttaatgtttaacccaatcgtaccaacgagaagagcaaactacatcagagcgtttggaacaaatgctgagagcactgctagatacaacccacaacataaaccgggaacatggatgccaggccctggtttacttggtgcgcaaaaagtgggacccaataatcacaatgtaggtccatacataaacgcagtgtttcccagtggagctaccaacgacggcagcaattcatctcttggaaccagcgttagtccagctattggatccatgggtccgactaaccttgaatataaaatgcagtggtaccaaacaccagaaggcagcggaacaactggcactatcactgaaaacccatctcttagtatgctaagagatcaggttctgtacagaggaaaccaacaaacatttaacctgaacgcagacacctggtgcttgccgaatcaaatatgggacagatatcctttgaacagagaacatcctatctggtgcaaaaaacccagatctgacagacacacagtaattgatccaaatgatggttctcttgcaatggatcatcctcctggaacaatatttataaagatggcaaaaattccagtgccaagctctagtggagctgacagttacttgaatatatactgcactggacaagtcagctgcgaagttgtgtgggaggttgaaagatattacaccaaaaactggagaccagagagaagacacrcggtacttggaatgggagaagttgagcacaatccaacttatcatgttaatgacctgggcgtgtatgtacagccaacaacttatgacatgtgtatgccaatcaaaacaaacatcaataaagttctttagata

SEQ ID NO: 208 - DNA, 4944 bp, Bocavirus gorilla/GBoV1/2009
  source 1..4944: mol_type = genomic DNA; note = Bocavirus gorilla/GBoV1/2009 / Bocaparvovirus primate 1 - NC_014358
tggtgagttcaaaatggctttcaatcctcctgtgattagagctttctctcaacctgcttttacttatgtcttcaagtttccatatccactatggaaagaaaaagaatacttactacacgcattacttgcacacggaacagaacaagcaatgattcagttaagaagctgtgcacctcatccggatgaagatataatccgagatgacttactgatttctttagaggatcgccattttggtgctattctatgcaaagctgtctacatggcaagcaccacactaatgtcacaaaaacgacgaaatatgtttcctcgctgtgacattattgttcaatctgaaattggggaagaaaaccttcactgccacatcataatcgggggagacggactgagcaaacgaaatgctaaatcctcttgtactcaattctatggactaattctagctgaactagtccaacgctgcaaaacactcttagctacgcgtccatttgaaccagaagaagctgatatatatcacgctctaaaaaaagcagaacgcgaggcttggggtgggattactggaggcaacatgcaaatcctacagtacagagatcgcagaggagatattcacgctcagacggtggatcctcttcgcttcttcaaaaactaccttttacctaaaaatagatgtctttcatcttacagcaaacctgaagtttgtacttctcctgagaactggtttattttagctgaaaaaacttacagtcacactcttgttaacgggctgccgcttcctgaacattacagaaaacactaccacacaaccctagataacgaaatcattccagggcctcaaaccatggcctatgggggacgtggtccgtgggaacatcttcctgaggtaggagatcagcgtttagctgcttcttctgtcagtactacatacaaacctaacaaaaaagaaaagctaatgctaaacttacttgaaaaatgtagtgaacttaatcttctagtatatgaagacttagttgctaactgtcctgaacttttacttatgcttgaaggtcagccaggaggtgcacgccttatcgaacaggtgctaggcatgcaccatatcaatgtttgctcaaactttacagctctaagctatttatttcacctttatcctgttacctctcttgactctaataacaaggcattgcaactgttgttgacacaaggctataacccactaatggttgggcacgccttgtgctgtgtgctgaacaaacagttcggcaaacaaaatactgtttgcttttacggccctgcttccacaggtaaaacaaacatggcaaaggccatagtccaaggaattagactttatggctgtgttaatcatttaaacaagggatttgtgtttaatgattgcaggcaacgcctagttgtttggtgggaggagtgcctaatgcaccaagactgggtggaaccagcaaaatgtattctaggaggaacagagtgtagaattgacgtcaaacacagagatagtgtactattgactcaaactccagtaataatttccactaaccacgatatctatgcagttgttggtggtaattctgtgtctcatgttcatgcggctccactgaaagaaagagtgattcagctaaactttatgaaacaactttcacagacttttggagagatcactgctacagaaattgcagctctactacactggtgtttcaatgagtacgactgtactctgacaggctttaaaacaaaatggaaattagataaaattccaaactcatttcctcttggggtcctttgtcctaatcattcacaggactttacacttcacgaaaacggatactgcactgattgtggtggttaccttgctcatagtgctgacgattctgtgtacactgattgcacaagccaaactagcagagaagaactcgacccaggtaagcttaactacattaactattctacattacatcttacttccaaagcttatataactttatttacaggtaacctgggggatacggacggagaggacaccaagccagaaacaccggaagtgggtgtttgtgcacccaagaagcgacgcataagtactcctacaactcctccaaactcaccagcaagttcagtgagtacctttaccttttttgataattggtacgcacaaccacaggacgaagatgagctcagggaatatgaaagacaaacatcgctcttacaaaagaaaaggcagtccagggaaagacgagaaaaaacgccagtggcagacatctcgtcacaggagtcacagccggagcccaatccgacacagtggggagaacaactcggggttttaccgtcaggaacacccgatcaaccacctatcgtcttgcactgcttcgaagacttcaggccaagtgatgaagacgaaggagaatacatcggggaaaaaagacagtagaaccaatccatacactgtattcagtcaacacagggcttcaaatcctaacgctccagggtggtgtgggttttactggcattctactcgaattgctagagacggtactaatgctatttttaatgaaatgaaacaacaattccaagaacttcaaattgataataaaattggctgggacagcactagggaacttttatttaatcagaaaaaaacactagatcaaaaatacagaaatatgttttggcactttagaaatgcttcagattgtgaacgctgtgcttattgggatgatgtataccgtagacacttagctaatgtttcctctcagacagaatcagaagaaataactgacgaggaaatgctttctgctgttgaaactatggaaacagatgcctccaattaaaaggcaacctggaggctgggtactacctggttatagatatcttggtccgtttaatcctcttgataacggtaaacctattaataacgctgatcgcgctgctcaagcacatgataaatcatactctgaattaataaaaagtggaaaaaatccatatttatatttcaataaagctgatgaaaaattcattaatgatttaaaagacgattggtctattggtggaattattggctcaactttttttaaactaaaacgcgccgtggctcccgctctgggtaataaagagcgagcacaaaaaagacacttctactttgcaaactcaaataaaggtgctaaaaaatccaaatccagtgaacctaaaccaagaacatcaaaaatgtcagaaaacgaaattcaagaccaacaaccatcagacgctgttgatggccaacgcggaggctcttcagcagctggtagtattggtggggggaaaggttccggtgtgggcatatccacaggagggtgggttggtggctcacactttgctgacaaatacgtgataactaaaaacaccagacaattcatcacaagcattcaaaatgggcatttatataaaacagaaataataaatccttcgaatggcaatgggaaatcacaacgctgcgtaaccacaccttggacttactttaactttaaccaatacagttgtcatttttcaccacaagactggcaacgcttaacaaatgaatacaaaagattcagacctaaagcaatgctagtaaaaatctataatttacaaataaaacaaattctttctaatggtgctgacactacgtacaacaacgacctaacagctggtgtccacattttttgtgacggcgaacacgcatacccaaacgcatctcatccatgggatgaagatgtaatgccggaccttccatataaaacatggaagctttttcaatatggatacattcctattttaaatgagcttgccgatcttgatggaactactgctggaggaactgcaacagaaaaggcaattttatatcaaatgccttttttcatgctggaaaacagtgatcatgaagttctgagaactggtgagagctcagaattcacatttaactttgattgtgaatgggttaacaatgaaagagcatacattcctccaggattaatgtttaacccaaaagttccaacaagacgagttcaatacataagacaaaacggacaaacaactgccagcactagtcgaatagaaccatactcaaaacctacaagctggatgacaggaccaggtttcctaggtgggcaaagagtaggaccagcaacatcagacactgctccctacatggtttgtaccaaacctgatggagtatacataaacactggagctgctggatatggatctggatttgatcctccaagcggcagccttgctcctacggacctagaatacaaacttcaatggtaccaaacaccagaagacacaggaaacaacggaaacataattgcaaatccatctttatctatgcttagagaccaactcctctacagaggaaaccaaacaacatacaacctaaatgcagacgtttggatgtttcctaaccaaatttgggacagatacccaataaccagagaacatccaatttggtgcaaaaaaccaagagcagacaaaaacacaatcatagatccatttgatggatctattgctatggatcacccaccaggaaccatttttatcaaaatggcaaaaattccagttccatcttcaacaaatgcagactcgtacttaaacatttactgcacagggcaagttagctgcgaaattgtatgggaagtagaaagatacgtaacaaagaactggcgtcctgaaagaagacacactgcacttggaatgagcattggaggaacagaaaatgtaagcccaacttaccatgttgactctgctggaacatacatccagccaacaactttcgatcaatgtatgcctgtaaaaacaaacatcaataaagtgttgtaatcactttagcctcttttttgcttacgcttgtaagttcccttccaatggacaagtggatagtgaagggtgactgtaatcccgagctcatgagttcgaggctacagtccgatagca

SEQ ID NO: 209 - DNA, 5242 bp, Human bocavirus 3
  source 1..5242: mol_type = genomic DNA; note = Human bocavirus 3 / Bocaparvovirus primate 1 - NC_012564
tcagtgctacaacgtcacatataaaataataaatattcacaaggaggagtggctacgtatggggtgatcataaacacgcccaggaagtgacgtatgtcagccaatcagcatcgagcatataacctatataaaccgatgcacttccgcatttcgtcagactgcatccggtctccggcgagtgaacatctctgggaagagctccacacttgtggtgagtcaaattatggctttcaatccacctgttattagagcattctcttcacctgcttttacttatgtcttcaaatttccatatccatcatggaaagaaaaagaatggcttcttcatgcacttctggctcatggtaccgagcaagccatgatccagctgagaaactgtgttcctcatccggatgaagatataatccgtgatgacttactactttctctagaagatcgccattttggggcaattctctgcaaggctgtctatatggctactactacttttatgtcacagaaacaaagaaatatgtttcctcgctgtgacataatagtccaatctgagcttggggagacaaacctacactgccatattatagttgggggagaaggcttaagcaagagaaatgcaaaaacatcatgtcctcaactatatggactgatactaggggaattaatccaacgctgcaaaactcttctggctacgcgtccttttgaaccggaagaggcagaaatttatcatgctttaaaacgagctgagcgagaagcttggggtggagttactagcggcaacctacaaattctccaatacagagatcgcagaggagaccttcacgcacaacaagtggatgctcttcgcttcttcaaaaactacctattgcctaaaaatagatgcattacatcttacagcagacctgatgtctgtacttctccagaaaactggtttgttttagctgaaaaaacttactgtcacactcttgttaacgggctgccgcttccagaacattacagaaaacactaccacgcaaccctagataacgaagttctaccagggcctcagacaatggcctttgggggacgtggtccgtgggaacatcttcctgaggtaggagatcaacgtttagctgcttcttctgttagtacaacatataaaccaaacaaaaaagagaaacttatgcttaacttactagataaatgcagcgaattaaatcttttagtttatgaagacttagtagctaactgtcctgaacttttgcttatgcttgaaggtcaaccaggtggggcacgcttaatagaacaagtcctaggcatgcaccatattaatgtttgctctaactttactgctcttagttatctctttcacctttaccctggcacaaccttatcttcagataacaaggctttgcagctgttgttgatacaaggttacaacccattaatggttggtcacgccttgtgctgtgtactcaacaagcaatttggcaaacaaaacactgtttgcttttatggaccagcttctactggtaaaacaaacatggcaaaggccatagtccaaggcattagactatatggctgtgttaatcatttaaacaaagggtttgtctttaatgattgcagacaacgcctagttgtttggtgggaggagtgcttaatgcaccaggattgggtggaaccagcaaagtgtatcttgggtggaactgagtgtagaattgacgtcaaacacagagatagtgtattattgacacaaactccagtaattatttccactaaccacgatatctacgcggttgttggtggtaattctgtttctcatgttcatgcggctccattaaaagaaagagtgattcagctaaattttatgaaacaacttcctcaaacatttggagagatcactccagaagaaattgcagctctactgcaatggtgtttcaatgagtacgaatgtactctgacaggctttaaaacaaaatggagcctagataaaattccaaactcatttcctcttggggtcctttgtcctactcattcacaggacttcatactccacgaaaacggatactgcactgattgtggtggttaccttgctcatagcgctgacgattctgtgtacactgatcgtgcaagcgacactagcaaagaagccatcgacgcaggtaagtttacgttctccaagcactttatatatatcctatacacaacactaaaacatatgtttaattacaggtgacttgggggatacggacggagaggactccgagtcagaagcatcggaagtgggtgttcgtccatccaagaagcgacgcataactattcctgcaactccaccaaattctcctggcagctctgtgagtacttctgccttctttgataattggtgcgcacaaccgcgagacgaagatgagctcagggaatacgaaagacaagcatcgcgcctacaaaagaaaagggagtccagggagagacgagaggaaacgcccatggcaacctcatcacaggagtcggagtcggagcccaatccgacgcagtggggagacaagctcggggtcataccgtcaggaacaccagatcagccacctatcgtcttgcactgcttcgaagatctcagacccagtgacgaagacgaaggagaatacatcgggaaagagagactctagaactaatccatacactgtattcagccagcataaagcctcacatcctgatgctccaggatggtgtgggttctattggcattctactagaattgctagaaatggtactaatgcaatctttaatgaaatgaaacagcagttccaacaactgcagctagacaacaaaattggctgggatagtgctagagaattattgtttagtcagaaaaaatcactagatcaacaatacagaaatatgttctggcactttagaaatgcttctgattgtgaacgttgtaattactgggacaatgtataccgtatgcacttagctcatgtttcctctcagacagaatcagaagaaataactgacgaggaaatgctttctgctgctgaaagtatggaaacagatgcctccaattaaaaggcaacctggagggtgggtgcttcctggttacaaataccttggtccatttaatcctcttgataacggtgaaccagttaataaagctgatcgtgctgctcaatctcatgataaatcatattctgaattaataaaaagtggaaaaaatccttacttatatttcaataaagctgatgaaaaattcattgacgatttgaaaaacgactggtctcttggtggcattattggctcaagtttctttaaacttaagcgcgccgtggctcctgctctagggaataaagagcgagctcaaaaaagacacttttattttgcaaactcaaataaaggtgctaaaaaatcaaaaaacaacgaacctaaaccaagcacctcaaaaatgtctgaaaatgaaattcaagaccaacagccatcagaacctaatgatggccaacgaggagggggaggaggtgcgaccggcagtgtgggaggggggaaaggttctggtgtgggtatatccacaggtggatgggtaggaggcagctactttactgactcctatgtaataacaaaaaacaccagacaatttctggttaaaatccaaaacaaccatcaatataaaactgaaagtataattccttccaatggaggaggaaaatcacaaagatgtgtcagcacaccatggtcatactttaactttaatcaatacagcagtcatttctcaccacaggactggcagcgcctaacaaatgaatacaaaagattcagacctaaaggtatgcatgttaaaatctacaatttacaaataaaacagattttatcaaatggtgctgatgttacatacaacaacgacctaacagcaggagtacacatcttttgtgatggcgaacatgcatatccaaacgctacacatccatgggacgaagatgtaatgccagaacttccttaccaaacatggtatctgtttcaatatggatacatacctaccattcatgaacttgcagaaatggaagactccaatgcagtagaaaaagcaattgctttacagataccattcttcatgcttgaaaacagcgaccatgaagttctaagaactggagaaagtgcagaatttaacttcaactttgactgtgaatggattaacaatgaaagagcattcattcctccaggactgatgtttaatccattggtaccaacaagaagagctcaatacatacgaagaaatggaaacactcaagcaagtacatcacgagttcaaccctatgctaaacctacaagctggatgactgggccaggtttactcagtgcacaacgagtaggtccagctgcttctgacacagctgcatggatggttggtgtagatccagaaggcgcaaacatcaactcaggaagagcaggagttagcagtggatttgatcctccagctggatcactcagacctacagatctagaatacaaagtacaatggtaccaaactccagctggaacaaacaacgatggaaacatcatttcaaatccacctttatcaatgcttagagatcaaactctctacagaggaaaccaaacaacctacaacttatgctcagatgtatggatgtttccaaatcaaatttgggacagatacccagtaacaagagaaaatcctatttggtgcaaacaaccaagatcagacaaacacacaacaattgatccttttgacggatcaatagccatggatcatccaccaggcacaattttcatcaaaatggcaaaaattccagttccttcaaacaacaacgcagactcatacttaaacatctactgcactggacaagtcagctgcgaaattgtctgggaagtcgaaagatatgcaacaaagaactggagaccagaaagaagacacacagcactcggccttggaattggaggggcagatgaaatcaacccaacataccatgttgacaaaaacggagcatacattcaacctacaacatgggacatgtgctttccagttaaaacaaacatcaataaagtgttgtaatctcttaagcctctttattgcttacgcttgtaagttcctctccaatggacaagtggaaagaaaagggtgactgtaatcccgagctcatgagttcgaggctacagtccgatggcagtggcgttgccgtctcgaacctagccgttacacccttgtgcattgtgggaggagctgttttgcttacgcaaccgcgaaactctatatcttttaatgtgt

SEQ ID NO: 210 - DNA, 4786 bp, Bocavirus pig/SX/China/2010
  source 1..4786: mol_type = genomic DNA; note = Bocavirus pig/SX/China/2010 / Bocaparvovirus ungulate 3 - NC_038537
tggagacagcgtatataaggacagcacattaagcgaacggtctctttgcttcacttcacagcagagaacacacatttcgacgctctcaatcggcggcggtgagtacagcatggctctacttcacttcaagaatgcctttgaaagctttacgggtgttgcctatacttatattcttcgactacctaaatttcctgaagagaactatcactcaaacctgcaacaatgtttggggaatagctttcacgcaaatctttatgaagacatggcaagcacaggcttgtatccagattttccgatcgaacactgctctgatttggctgactatcaatcaaaaacttatgaaaaaagtctggccgactttgccgaagttgccataaaaaaggtgtttgaaattcaacaatatactaaaacaccttcttacaacagctacatacaagtagaacatggctccaatttacatgttcacttggtgatagccggcaccggcttaacaaaatacactgcgaaagcttttaggcctaaactagcagcatatttctatgctcaaattgaacaaaaacaaaaagaaatgctaaaatacctatacggctcagattcctggaagccatatactgaaccagtaaaaacagcattagaagaatcactaaatggaagctctgaatattgcaccattctacaatacaaaagtagaaacggagaaatgtactcttgtagagtagaccctaaaagcttcgtttcaaactatttgctacctaaaaacttagaaattggctggaaaaactggtcaggaacatacaaagttccaggaccaatggcagactcgtttctactgactggaaaatactacacttacacaagcataaacggcctacaactgcctccagatgaaagaaaaaatctaaaagactggttagatgaatcatttggaataaacacatcagagccaatctttactggagatcctttagctgacttaccaaaggtaagcaaagctcaatgggacaaaacaacacagccgggaggaaaaatgtctaaaagagaaagcttggttcttgattgcatgaatagagcaatcgaaagcgactgtttaacttacgaacagcttgtagataagcacccagaacttataataatgatggaaagccaagcaggtggcaaccgtttaattgaacaaaccttgaacatggttcacataaagctaacgcaaaaatatacagccatgacttatcttgtaaaacggtttccgacctttgagcttgcgttagacaataaagtaattagactgttgaactttcagggctataactactggcaagttggacattggctttgttgcgtactagacaaaaaaagcggcaaacaaaatacagttagcttttacgggccagcaagcaccggtaaaactaacttagcaaaggcaatagtaaatgcagttaatctttttggaaacgtgaatcatttaaacaaaaattttgtgtccaatgattgctccaacaaacttattgtttggtgggaagaagcattgatgcacacggactgggtggaaccagcaaaatgtgtgcttggaggaacaactgtgagagtcgatagaaaacacaaagactcacagctccttccacaaacaccgtgcataatttcaacaaacaacaacatctacgaatgcgttggaggaaatcacgtttcacacgtacactgcaaacccttaaaagacagagtcgtgcaacttaatttcatgaagacactgccgcaacactttggtgaaatttcaacagaagaggtggcagcatggctcctaacttgcaagaacaaatttcagtgcacattagaaggttactgcaatcaatggaaagtgaaacacgtaataaacgacatgccgcttgctaaagtgtgtgcctctcattcacaggattttaccttacatgaacaaggaacgtgcacccattgtggtgcttacctgcctcttactattgatattgaatcttgcggcggtgataatcctggggacgacggacgtaagtaacattttttacaaaagggacagggaaataaatctttaaaaaatactaaatatctattttttcataggtgtccctgattgagcaatcatcggaactaatagctcgagtgctcgaggtcaaggcggagaacctgacagaaagaagctgaaataccaggtacttactaaagaacaggaagagttcctagatgagtgggcatcacagccacaggatgaatcagagatcgagctatacaaccgaagaagagagcagctcttcgaatcgccgctctcctctgacagcaaggacatctccgaaacagagccgacatcggagttggagtcggagtcggagtcggagtccaagaagaaagagggaggagagcccatacagggggaggaaagaaatgagcagatctccccagaaacaggggaaagagaggattgagcagcctagaaaacaatttaaagaaaaaaagaatagcattgttgatgcttttgtaaaatataaagctaagcataatactgatcaatctttttgcgggtttcactggcattcatggagattagctaaaaagggcacagacagggtatttgatgaaatgaaagctgaatttcaaattcgctgcagggatgggaaaattgagtggcctgatgcaagggaaatgttgtttaaatttaaaaaagctatagataaagattacagaagcatgctgtggcacttcagatttactgaatgtactaaatgtgatttttgggatgatgtgtacaaaaaacatatggctaatgtgcatcatgaacctccacaggaattaacagacgaagagctacttgcagcattgcaagaagctgaagctggaaaataaaactgatgatcattgtgctcatgtttattataagcttaataaaatttgacatatgaatcaattgtttcctgtggtacgctccaaaaaaaacgacggcaaaagaggacacgggaaaaaagctgaaaaacgaccaagtgaactaaaagatcctgaaaaacctacaggtgaactcgaactagttggagaaagatccaactgttccaaaactcaaagacatttttactttgcgtgccaaaaccaaggtgcaaaaagagcaaaaatgtccgcacaggggggcgagaacattgaagaggttgaagtggatacaggtgcgggaagtgggcggtcaggcggtggcggaggaggtggaggaggaggaggctctacaaatggaggaattggaatggcaacaggaggttgggttggaggaacatactttggaaaaaacaaaatagtaacaaacataacacgtcaatggtacgtgccgatatataacggccacaaatacacaaaacagacagaaacagataatactaacttttggaacggaataagaacaccatggggctacattaacatgaactcatacagctgtcatttttctccaaatgactggcaaagacttttaaacaactacaaaaggtggaaaccaaaaaaaatgaggctgcagttatacaacttacaaataaagcaagtagtccaactaggcacagatacactatacaacaatgatctgacagcaggggtgcacattatgtatgacgggtcacaccaatacccatactcacaaagtggatgggacagtgagctaatccctgaactgccagggatgatttataaactaccaaactattgctacttccaggaactaggtgacataggtgatacaggctcagacttaagagaatcatggctagggacagcatgtcccttattctttcttgaaagctcctcacatgaggtactaagaacaggagaagaaacaggatttgaatttgattttgattgtggatgggtacataatgacagagcattttgtccaccacaatgcgactttaatcccctaatcaaaaccaggcgaagcagaataataatgggttcttcaggaaacacatcagaaccatactatgactacaaaaaacctagcaattggatgccaggaccaggaactcgactaaacggacaccaatcaggaaacaatctaaaaacatcttctgggccctttaacacatcatgggcaccaccaggggtaacacagggaagtgacacaacctacctaaactcaccagcaatgaatcgatcacaatgggcctcaaaatcaatgccaacagcaccagcaaatgctgcatgcagtcaagtagacccaaactcactagcattcaacgaaccaacacaattaggacagcaaggtgacactaacataagatacaacaacataagcaatgatctaactagatggggaacagtatggagtcagtcacaacaagtatacacatcacaaccaacacaaactcgactagacacagtatggcaatacccaatgcaagcatggaacggacaggaagtaacacgctacgctccaatttgggacaaacaaccaaacacagattaccatacaacattatcatcatcagacggaacacttccaatgaaacatcctccaggaaacatattcattaaagtagcaaaaattccaataccaacagaaacaaacacagattcatatctaaacatatactgcacaggacaaattcccattgaaattgaatgggacgctgaaggatatgaaacaaagaactggagaccagaactaagaataacatcctcaaacattggcagaggggtgtacaacataaatgccgcaggagaatacaacacaacaggaagccaactcagcaacatgccaacaagatttggaatgaacagaatcaaccaagtgttgtaa

SEQ ID NO: 211 - DNA, 5371 bp, Bosavirus MS-2016a
  source 1..5371: mol_type = genomic DNA; note = Bosavirus MS-2016a / Copiparvovirus ungulate 5 - NC_031959
gaacttccggtgacgtgtaagtcccgcctccacagcaaccaataagagtttaggggttcaaacccggaagtgtggaagcataaatgtgcaggcaaaaaggggaagttactgctgtcgcggagaactcgcctctcggtaagcaccatgctctcttactactacggggtagctaatttattccctgatatgtccattataccaggggtagctaaaaagccatatgttactacttctaaattactaaaaggagtgaaccctgattggccagaactaccagaaaaatatgtctttgcggcacaaacagctcaaggactatacttagagcttctaaaacaaattagaattgaaatcaaagatccttacggagtacccattttcttccaacttgaagagggagaaaatggaaaactccattttcactggatgatatccacaatggtaggaacagcaagagacctaggacaaataattaaaacagctgaaacccaatttaatcacttttggttagggactagaggaatcacatactttaaacctaacaaaaacagaaacggttcttggagcactactaacagtacatttctccaagtttacctactgcctaaactaccactcaaagatgttttatgggcatggagcaacttagacggaaaagaaggagaagccactttaaaccagacacttagaaaagaatttttagacatgaaaaaagggaaaacatacctcactacaaacacaacatcagatgatgaagatgatgaacaccaagcacccatatacaaacaccagagtggagtacaagtaaaaactttgttaaattttatggtagagaatgacattactactgaagagaaataccaaaatagattcatgacttcatactgctcatacattgcaacccaaaacggaacacacctactaaaacaaaccctacagctagctaaaacagaaattgctagaaacaaaccattagcattaactttgtgtggattcaaatccagaactgaactgctcacatttttgaatgaatacacacctcaatctatggaggaaagcaaaatttggaaactatttttagaaaacgggtacgatccagatgaagctgctgcagttttctttgcatgggcgtacagactaactgggaaaagaaatgctatttggataagcggacctcctaccacaggaaaatctaatttagcccaggcaatagctagaacagcagcttcatatggatgtgtaaactggaacaaccctcattttccattccaagacattataaacacccaactagcattatgggacgaaggtagaatagacgaagcaataattgagcaaacaaaaagcttattatctgggatacaaacgagaatagatagaaaatgcaccaccagcaaagagacaactccaccaccatttcttatcactagtaactgtgatatcacacttgtatactcaggcaacatgacaactacattacacaggcaagctttagaagatagaattcttcactttacattttcaaccaaatgtaaacctgattttggccttttaacaaccaatgatgttaaaaactttatgaaatggggagcatggtccttaatgagagcgaaacacaaccgttacagcctaattaggaaaggcccaacgacttggccttgccacatccctcaacaagccacagaaactcagttaggatatgtcttacgtaaaaaaccactatggcccacgaccaatgaggaagaagacattatatatatagaagacgatgaaattcttaaagcagctgaaactgcagaagaagctgaaactgaaaacatagattccatactagaagacccaaacacagacacaggaccaaaaaaggtaagagttgggataatacctaacactacaatttttgctgctcactaaataactgacaatgattaactgacagctattatcccttctcttacagaaaaaacaaaaaactcaccacgtggaacctcctgacagcccacctaaagaggtggttgacgcagctgaagccctgcttaccctggctggcgtggggactccgccaagtaatcctgctaccccggagaaccctgtgcaggaagacaatatacaagaacagtaagtgtatttttccaacatgcaactcaaccaacaagactaccaggacagtttagctattttaagacacagaactcccggtgatttaatacataataatcaaccaattacaggctcatactttggccctaaaacatttctaagagttaaactagaccactgggcaggccaccacaactggtcaatgacacagccatgggaatacgaaagaagagcatggatctacagctacttgactgctcttcactttgtaaacatgaatgcagcagggctagactacaaatacaatcttttcgatgaagtgcttcagcacttaatgcaagaatactttacaggagcaagagactccgctaactttaacagacatttatacacactttataacagcgctctaagatacaatgcaccagacgaagtactaaaacacattagagatgtaatgagcatctccagcccagtagacctatttgacgataaagaaataagattcctacaagacacagacatttcatgggacagatggaggctagcagcttccaacttcatagaagactcaattagagaaattgagataatgatagatcacaaagcaaaagaaaaacaacaccaggcagaacttgaagaacaaaacagactaaaacaagcatacgaagaacaaatgaaacgtagatatccacacactaatcaccaatatgacggaccacatattgactgggacattcttcaaaaagtactgcatgaacagcagtacagaaaacaatttgacagacaatacccacacactgactacggaccatacggaggaccgaatattgattttgacaggctaactgaacagctgcaaaaagagcatgatctccatgggaaggcgcatcaacagccaccagatacagattccggaggaggtcttacatatccagggacaagatatgttgggccgggaaatgtggtaccggctggccctcctgttaatcctattgatgacttggctctacaacacgatcttaggtatgcaacagttatggaacatggggaatggccatatatatatgatgagtctgatgatgtgttagccgcagacatttcacattacgggcaagataaaacttttttagggaacttgattaaagcaataatgcggttaaaaaaaaacttgggtgaactgccacgcaatatgctaagatccgtgtggccgttaaatccgttagaccacccacaaaaacaggaactagcgggtaaacgactttctcctccacccccacagataaaggaggaaccgatatcacctcagaagccacccaccactggagacgactcaaaggcgaaaagatttaaacaagatatgtctcatcaaactgcaccagatcaacacatgggccatgggggaatggactctaacatgggatcagactctgtaactattggggacggggggggaggagggtctaaatctgaatgtgaaaaacattggtggggaggaactagatgggaagggaacactgtaactacttttggaactagacgctgcgtagtcaaaccattcccagataattattatgctgtaaaaagctgggataatatcccaggtatatgtgtagtcaccccttggtattayccagatcttaacattatgagcgcacattggagccccgcaaactggcaaactctactagaaacagaagaccaaattcgacctaaatctttaacattaaaaatacacacactaatctttaaagatgtaacaaaaaactcagaaggtggctccagtattcaagacattaactcaggtatccttctagtacatagagacaatgactacacatacccttaccctatgggaggaggacaactaacagtaccaggatcaatgccaggaagcttctacactttacctagatacagctacagaaccttaggcacaattgacactgataaaacacctactggtatacatcacgcatctgctgatgatttccactacaaaataacacaaaacagtgaacttttccttttagaagactcaccaagcagaatgctcttttctggggactgctactcttacagctatgattttccagctttgccattcgctaacttaacacagtacccatggaacacaagaagacaagacaaccctatgtcacagcagaaataccttgttatggacaacattctatcatcagatatctttgcacctcacggagggagcaaactcacaccactaccattcaattccaaacttagaccatctcaatggttaccagcacctagatttaaacagggagaatacaatataattcaacccacagaagacaaaacacaacactggtacaaaaaaacagtcaaggcaggagaaggagtaggagtcagactagtcagagaaacagacgcaaaaattataaaaaacacaaactgggaaacactacagccaggtccagacacagtttctaacattgtgagaaaaccagacggagcaatagtagtaaccactaacgctattgcagttcttcaacaagacgaagtgaaccaataccataaccaacaaaacacaacacaagcacaaaaatatgtcaaactaccaatcgaaaaccacaaaggttataaccaaccatcagacccacagccaattagacaacaaaacattcacgacagctcaacaactgaaattacttacgggacattcccagggtcaacatgggaaaaggcatcgatacacttagaatcccaaatttggacacgaatcccaaacgtcgaattcacacacttgccacaacacaacccactagcagaatgggctatgagagacccaccaccaacattattcctgagaatgcttcaacaagctggaccaccaaaagaagatcaatacaatggaacaataccctcagatacagtccttaaccagtacggacaatttttcctttcctactcaatgacatgggaaacaacacacagaaacagaggaacaaaaagatggaaccctattgatcccccaggactaccacaaagaagtgacaaaaaacccatatttgtaatgaatctagatgatgggaaacatgaaggaaacttataccacaccccagatgaagtatggacagcaaaacagagattcagagcaaagcgctaactttcctatgcttacctgctttcacccaaaaaaatgaataaaattttgaaaaagctaaaaagatgtacttctttcgcgggggagaattgggagagaaggcggagtcaaaaagaggaagtaaaaaaaatg

SEQ ID NO: 212 - DNA, 4693 bp, Bovine adeno-associated virus
  source 1..4693: mol_type = genomic DNA; note = Bovine adeno-associated virus / Dependoparvovirus mammalian 1 - NC_005889
gtggcactcccccccctgtcgcgttcgctcgttcgctggctcgattgggggggtggcagctcaaagagctgccagacgacggccctctgggccgtcgcccccccaatcgagccagcgaacgagcgaacgcgacaggggggggagtgccacactctctagcaagggggttttgtaggtggtgatgtcattgttgatgtcattatagttgtcacgcgatagttaatgattaacagtcatgtgatgtgtgttatccaataggatgaaagcgcgcgaatgagatctcgcgagacttccggggtataaaaggggtgagtgaacgagcccgccgccattctctgctctggactgctagaggaccctcgctgccatggctaccttctatgaagtcattgttcgcgttccatttgatgtggaagagcacctgcctggaatttctgacaactttgtagactgggtaactggtcaaatttgggagctgcctcccgagtcagatttgaatttgactctgattgagcagcctcagctgacggtggctgacagaattcgccgcgtgttcctgtacgagtggaacaaattttccaagcaggagagcaaattctttgtgcagtttgaaaagggatctgaatattttcatctgcacacgctcgtggagacctccggcatctcttctatggtccttggccgctacgtgagtcagattcgcgcccagctggtgaaggtggtgttccagaacattgagccgcggattaacgactgggtcgccatcaccaaggtaaagaagggcggagccaataaggtggtggattctgggtatattcccgcctacctgctgccgaaggtccaaccagagcttcagtgggcgtggactaacctcgaagagtataaattggccgccctcaatctggaggagcgcaaacggctcgtcgctcagtttcagcttgagtcctcgcagcgctcgcaagaggcatcttcccagagggacgtttcggctgacccggtcatcaagagcaagacttcccagaaatacatggcgctggtaagctggctggtggaacatggcatcacttccgagaagcagtggattcaggagaatcaggagagctacctgtccttcaactccacgggaaactctcggagccagattaaagccgcgcttgacaacgcgtcaaaaattatgagtctgaccaaatctgcctcagactatctcgtgggacagactgttccagaggacatttctgaaaacagaatctggcagatttttgatctcaacggctacgacccggcatacgcgggctctgttctctacggctggtgcactcgcgcctttggaaagaggaacaccgtctggctgtatggacccgcgaccaccggaaagaccaacatcgcggaagccatctctcacaccgtgcccttttatggctgtgtgaactggactaatgagaactttccctttaatgactgtgtggaaaaaatgttgatctggtgggaggagggaaagatgaccagcaaggtggtggaacccgccaaggccatcttgggggggtctagagtacgagtggatcaaaaatgtaaatcctctgtacaagtagactctaccccggtgattatcacctccaatactaacatgtgtgtggtggtggatgggaactccacgacctttgaacaccagcagccgctggaagaccgcatgttcagatttgaactcatgcggcggctcccgccagattttggcaagattaccaagcaggaagtcaaagacttttttgcttgggcaaaggtcaaccaggtgccggtgactcacgagtttatggttcccaagaaagtggcgggaactgagagggcggagacttctagaaaacgcccactggatgacgtcaccaataccaactataaaagtccggagaagcgggcccggctctcagttgttcctgagacgcctcgcagttcagacgtgcctgtagagcccgctcctctgcgacctctcaactggtcttccaggtatgaatgcagatgtgactatcatgctaaatttgactctgtaacgggggaatgtgacgagtgtgaatatttgaatcggggcaaaaatggctgtatctttcataatgctacacattgtcaaatttgtcacgctgttcctccatgggaaaaggaaaatgtgtcagattttaatgattttgatgactgtaataaagagcagtaaataaagtgagtagtcatgtcttttgttgaccaccctccagattggttggaatcgatcggcgacggctttcgtgaatttctcggccttgaggcgggtcccccgaaacccaaggccaatcaacagaagcaagataacgctcgaggtcttgtgcttcctgggtacaagtatcttggtcctgggaacggccttgataagggcgatcctgtcaattttgctgacgaggttgcccgagagcacgacctctcctaccagaaacagcttgaggcgggcgataacccttacctcaagtacaaccacgcggacgcagagtttcaggagaaactcgcttctgacacttcttttgggggaaaccttgggaaggctgttttccaggctaaaaagaggattctcgaacctcttggcctggttgagacgccggataaaacggcgcctgcggcaaaaaagaggcctctagagcagagtcctcaagagccagactcctcgagcggagttggcaagaaaggcaaacagcctgccagaaagagactcaactttgacgacgaacctggagccggagacgggcctcccccagaaggaccatcttccggagctatgtctactgagactgaaatgcgtgcagcagctggcggaaatggtggcgatgcgggacaaggtgccgagggagtgggtaatgcctccggtgattggcattgcgattccacttggtcagagagccacgtcaccaccacctcaacccgcacctgggtcctgccgacctacaacaaccacctgtacctgcggctcggctcgagcaacgccagcgacaccttcaacggattctccaccccctggggatactttgactttaaccgcttccactgccacttctcgccaagagactggcaaaggctcatcaacaaccactggggactgcgccccaaaagcatgcaagtccgcatcttcaacatccaagttaaggaggtcacgacgtctaacggggagacgaccgtatccaacaacctcaccagcacggtccagatctttgcggacagcacgtacgagctcccgtacgtgatggatgcaggtcaggagggcagcttgcctcctttccccaacgacgtgttcatggtgcctcagtacgggtactgcggactggtaaccggaggcagctctcaaaaccagacagacagaaatgccttctactgtctggagtactttcccagccagatgctgagaaccggaaacaactttgagatggtgtacaagtttgaaaacgtgcccttccactccatgtacgctcacagccagagcctggataggctgatgaacccgctgctggaccagtacctgtgggagctccagtctaccacctctggaggaactctcaaccagggcaattcagccaccaactttgccaagctgaccaaaacaaacttttctggctaccgcaaaaactggctcccggggcccatgatgaagcagcagagattctccaagactgccagtcaaaactacaagattccccagggaagaaacaacagtctgctccattatgagaccagaactaccctcgacggaagatggagcaattttgccccgggaacggccatggcaaccgcagccaacgacgccaccgacttctctcaggcccagctcatctttgcggggcccaacatcaccggcaacaccaccacagatgccaataacctgatgttcacttcagaagatgaacttagggccaccaacccccgggacactgacctgtttggccacctggcaaccaaccagcaaaacgccaccaccgttcctaccgtagacgacgtggacggagtcggcgtgtacccgggaatggtgtggcaggacagagacatttactaccaagggcccatttgggccaaaattccacacacggatggacactttcacccgtctcctctcattggcggatttggactgaaaagcccgcctccacaaatattcatcaaaaacactcctgtacccgccaatcccgcaacgaccttctctccggccagaatcaacagcttcatcacccagtacagcaccggacaggtggctgtcaaaatagaatgggaaatccagaaggagcggtccaagagatggaacccagaggtccagttcacgtccaactacggagcacaggactcgcttctctgggctcccgacaacgccggagcctacaaagagcccagggccattggatcccgatacctcaccaaccacctctagcccaattctgttgcataccctcaataaaccgtgtattcgtttcagtaaaatactgcctcttgtggtcattcggcgtacaacagcttacaacaacaacaaaacccccttgctagagagtgtggcactcccccccctgtcgcgttcgctcgttcgctggctcgattgggggggtggcagctcaaagagctgccagacgacggccctctgggccgtcgcccccccaatcgagccagcgaacgagcgaacgcgacaggggggggagtgcca

SEQ ID NO: 213 - DNA, 4642 bp, Adeno-associated virus 5
  source 1..4642: mol_type = genomic DNA; note = Adeno-associated virus 5 / Dependoparvovirus mammalian 1 - NC_006152
ctctcccccctgtcgcgttcgctcgctcgctggctcgtttgggggggtggcagctcaaagagctgccagacgacggccctctggccgtcgcccccccaaacgagccagcgagcgagcgaacgcgacaggggggagagtgccacactctcaagcaagggggttttgtaagcagtgatgtcataatgatgtaatgcttattgtcacgcgatagttaatgattaacagtcatgtgatgtgttttatccaataggaagaaagcgcgcgtatgagttctcgcgagacttccggggtataaaagaccgagtgaacgagcccgccgccattctttgctctggactgctagaggaccctcgctgccatggctaccttctatgaagtcattgttcgcgtcccatttgacgtggaggaacatctgcctggaatttctgacagctttgtggactgggtaactggtcaaatttgggagctgcctccagagtcagatttaaatttgactctggttgaacagcctcagttgacggtggctgatagaattcgccgcgtgttcctgtacgagtggaacaaattttccaagcaggagtccaaattctttgtgcagtttgaaaagggatctgaatattttcatctgcacacgcttgtggagacctccggcatctcttccatggtcctcggccgctacgtgagtcagattcgcgcccagctggtgaaagtggtcttccagggaattgaaccccagatcaacgactgggtcgccatcaccaaggtaaagaagggcggagccaataaggtggtggattctgggtatattcccgcctacctgctgccgaaggtccaaccggagcttcagtgggcgtggacaaacctggacgagtataaattggccgccctgaatctggaggagcgcaaacggctcgtcgcgcagtttctggcagaatcctcgcagcgctcgcaggaggcggcttcgcagcgtgagttctcggctgacccggtcatcaaaagcaagacttcccagaaatacatggcgctcgtcaactggctcgtggagcacggcatcacttccgagaagcagtggatccaggaaaatcaggagagctacctctccttcaactccaccggcaactctcggagccagatcaaggccgcgctcgacaacgcgaccaaaattatgagtctgacaaaaagcgcggtggactacctcgtggggagctccgttcccgaggacatttcaaaaaacagaatctggcaaatttttgagatgaatggctacgacccggcctacgcgggatccatcctctacggctggtgtcagcgctccttcaacaagaggaacaccgtctggctctacggacccgccacgaccggcaagaccaacatcgcggaggccatcgcccacactgtgcccttttacggctgcgtgaactggaccaatgaaaactttccctttaatgactgtgtggacaaaatgctcatttggtgggaggagggaaagatgaccaacaaggtggttgaatccgccaaggccatcctggggggctcaaaggtgcgggtcgatcagaaatgtaaatcctctgttcaaattgattctacccctgtcattgtaacttccaatacaaacatgtgtgtggtggtggatgggaattccacgacctttgaacaccagcagccgctggaggaccgcatgttcaaatttgaactgactaagcggctcccgccagattttggcaagattactaagcaggaagtcaaggacttttttgcttgggcaaaggtcaatcaggtgccggtgactcacgagtttaaagttcccagggaattggcgggaactaaaggggcggagaaatctctaaaacgcccactgggtgacgtcaccaatactagctataaaagtctggagaagcgggccaggctctcatttgttcccgagacgcctcgcagttcagacgtgactgttgatcccgctcctctgcgaccgctcaattggaattcaaggtatgattgcaaatgtgactatcatgctcaatttgacaacatttctaacaaatgtgatgaatgtgaatatttgaatcggggcaaaaatggatgtatctgtcacaatgtaactcactgtcaaatttgtcatgggattcccccctgggaaaaggaaaacttgtcagattttggggattttgacgatgccaataaagaacagtaaataaagcgagtagtcatgtcttttgttgatcaccctccagattggttggaagaagttggtgaaggtcttcgcgagtttttgggccttgaagcgggcccaccgaaaccaaaacccaatcagcagcatcaagatcaagcccgtggtcttgtgctgcctggttataactatctcggacccggaaacggtctcgatcgaggagagcctgtcaacagggcagacgaggtcgcgcgagagcacgacatctcgtacaacgagcagcttgaggcgggagacaacccctacctcaagtacaaccacgcggacgccgagtttcaggagaagctcgccgacgacacatccttcgggggaaacctcggaaaggcagtctttcaggccaagaaaagggttctcgaaccttttggcctggttgaagagggtgctaagacggcccctaccggaaagcggatagacgaccactttccaaaaagaaagaaggctcggaccgaagaggactccaagccttccacctcgtcagacgccgaagctggacccagcggatcccagcagctgcaaatcccagcccaaccagcctcaagtttgggagctgatacaatgtctgcgggaggtggcggcccattgggcgacaataaccaaggtgccgatggagtgggcaatgcctcgggagattggcattgcgattccacgtggatgggggacagagtcgtcaccaagtccacccgaacctgggtgctgcccagctacaacaaccaccagtaccgagagatcaaaagcggctccgtcgacggaagcaacgccaacgcctactttggatacagcaccccctgggggtactttgactttaaccgcttccacagccactggagcccccgagactggcaaagactcatcaacaactactggggcttcagaccccggtccctcagagtcaaaatcttcaacattcaagtcaaagaggtcacggtgcaggactccaccaccaccatcgccaacaacctcacctccaccgtccaagtgtttacggacgacgactaccagctgccctacgtcgtcggcaacgggaccgagggatgcctgccggccttccctccgcaggtctttacgctgccgcagtacggttacgcgacgctgaaccgcgacaacacagaaaatcccaccgagaggagcagcttcttctgcctagagtactttcccagcaagatgctgagaacgggcaacaactttgagtttacctacaactttgaggaggtgcccttccactccagcttcgctcccagtcagaacctgttcaagctggccaacccgctggtggaccagtacttgtaccgcttcgtgagcacaaataacactggcggagtccagttcaacaagaacctggccgggagatacgccaacacctacaaaaactggttcccggggcccatgggccgaacccagggctggaacctgggctccggggtcaaccgcgccagtgtcagcgccttcgccacgaccaataggatggagctcgagggcgcgagttaccaggtgcccccgcagccgaacggcatgaccaacaacctccagggcagcaacacctatgccctggagaacactatgatcttcaacagccagccggcgaacccgggcaccaccgccacgtacctcgagggcaacatgctcatcaccagcgagagcgagacgcagccggtgaaccgcgtggcgtacaacgtcggcgggcagatggccaccaacaaccagagctccaccactgcccccgcgaccggcacgtacaacctccaggaaatcgtgcccggcagcgtgtggatggagagggacgtgtacctccaaggacccatctgggccaagatcccagagacgggggcgcactttcacccctctccggccatgggcggattcggactcaaacacccaccgcccatgatgctcatcaagaacacgcctgtgcccggaaatatcaccagcttctcggacgtgcccgtcagcagcttcatcacccagtacagcaccgggcaggtcaccgtggagatggagtgggagctcaagaaggaaaactccaagaggtggaacccagagatccagtacacaaacaactacaacgacccccagtttgtggactttgccccggacagcaccggggaatacagaaccaccagacctatcggaacccgataccttacccgacccctttaacccattcatgtcgcataccctcaataaaccgtgtattcgtgtcagtaaaatactgcctcttgtggtcattcaatgaataacagcttacaacatctacaaaacctccttgcttgagagtgtggcactctcccccctgtcgcgttcgctcgctcgctggctcgtttgggggggtggcagctcaaagagctgccagacgacggccctctggccgtcgcccccccaaacgagccagcgagcgagcgaacgcgacaggggggagag

SEQ ID NO: 214 - DNA, 5105 bp, Bovine hokovirus 1
  source 1..5105: mol_type = genomic DNA; note = Bovine hokovirus 1 / Tetraparvovirus ungulate 1 - NC_038898
ttccggttccggtgacatcacttccgcttacgtgtttccggttccggtacgtcacttccgcttccggcggatgctgacgtgtccttgcggacaggaagatgatgtggacttccgggacagcccaccctcgccacacctacctcgcccttaagaatcagtctcaggctgtgcacttccttttcggatcagccgccgaagagaatggacgccacctgcttcaccgctgtgctccaggtccccactgtcttctgtgatgccgtgcctgtgcagtttcaacaaccttctgtggtcctaagagaggtaccagacgagtatccagactggcccgtgagtgatctgcgtcaatatgcaagccactttgatctggcagttaacttaggccacatattgtatagggagttactggagtctttttctatgatacttccattgtatccccagccaaagttgtttctgcagttagaaccaagtaagtcagatgatcgggaatttcattatcatttagtgtgtgagcaggggcagatgtctgggagagagttttcaacttggctgaaaagatggcgcacctttatggaccgatacatggcaggtcaccatgtatgggggttgctatggaatattaggaagactcgccagggcagactataccaggctgacctgagctttgtagtgaggtatttgctacccaagttgcctgtagaaaactgttggtttgcttggagtaacatagacagatttcaggcctctttgttaagtgtccccaaccgtgtcaggtgtttaggagagggtggagctattgctctgccatatgtagaaggggcagttgcacttcccggcggccaagctgtatcagaagctcctagcatgggaggtaaaggtactgaccgttttttgtcactcattgactggttagtagaacagggcatagctactgaacgtagatggctaagtgcagacaagcgcagctatagaagttttctagggtcaagtggtggagtcttacaggccagaaatgctttgttagttgcaagaagagagatggttctcgctcaccccctgttaggctatttacaaaggggaggttctgccgtagcagcagataacagggtgatagagctctttaaacttaatgcatatgatccagaggatgcggcttggtattttgcagcttgggctcaaggcatttggccaaaacgcagagcattgtggctctggggccctgcgagtacgggtaagacattgttagccgcagcaattgctaacatcagtccttcttatggatgtgtgaattggactaaccaaaattttcctttcaatgattgtcattgtcagtctcttgtatggtgggaggaaggccgtatgacagagaatattgttgaggtggccaaagctattctaggtggagcaccagtcaggctagatgtaaagaataaaggcagtgaagactttatacccacctgtgttattatcacgtcaaatggagatttgacggtgactgtagatgggcctgtagttagtactgtgcatcaagaggcattgcagacgcggatcaccatgtttcagtttaaccgtttggtccctcccggattagcaccgataccagaagcagatttgcatgacttttttaagtggggcagcgagctattaaaagacaagggcagtccacctgaagctttcagagtgccacgtaggtttgacaagcctactctgagtgacgtgtcacgcagtcctcgactgccaatcagagacgtgatagaatctcgcgagtcttggagctctgaagatgagtggttccccagttcgcgaagttcttcggcgattcgtccgaggacgagtactccgcagagctctccagcagctagccctcctacaccggacacggcagcggcgttggcgtccgggccgtttccagaggctgactccgacgaagaaaggtatgctcgtgctgcggatgatcctctgatagagagttggtggtgtcagtacctggccgactttgactgggcagaacggttgtacttggtgggaccacaaggccctcgcgcacgaggtcttttctactatcagctgtggatcagagagccttggcggtatcgtcgaaccttgcgacattcagaatccgcactcaagagcaaattatattcttggtggaactggtagggtaagtacacatgctacatctgtttatgtctttcagatctaagagtgaaaacacttcttctcagaagaaggtgactcagtccaagtaatctcttctcctaacaggtaagaccatgtccgctgcagatgcctaccgccccggtgatcgactccctctggataccctgatgagtaaaataacctatgacgtgggctttgaaccaacccgtcacggtgggagaggtggtggaggctatctaggagaacttacaactggtctgctgtttactaaagcctttcacgagcttagccgctatgcaagcaacctcccatatgagctgtttccaattaggcaactagtaaatcagttaatcaataaaaggcgagaaacaaacaacatccataaagttatgaggtttttcatggatgtcatcagacttctgcttactgtgtcacatggaccggctgagcagcgactgaggcaggcaatggctcctgtagcagactttttctatgaacccagtaggcaccagttcgctatcggcccaaatgtatcccctttgcaagacttggctagatacgctcatacagctcaaaaacctactcgagaagcaattgaagccttttttcagggcatgttatctcccatcaaacctgaagatagacctatattagacaccatacagaagcagtttgaggagtttttttatcctcctatagtggaacatgctggaccaggcgactacagtcgcgacggtgatacgggagctggtacccctagtgaatcagaccttgagcgccctgccaaccgcggactcttggtccccggctacaattatgttggtcctggtaatcctctggataatggtccccctcagggaccagtggatgaggcagcgaagcaccacgatgaacggtacgatgaaatgttgtctcatggcgacctgccatatgttcatggtcacggggcagatagattgatgaacaaagagattgaaagggctgaaaaagaagggcgtgtgaccggtgtgggtgataagctactgggtaatgtaattcgagggatatgggaagcaaaagaaacaattggtgatgtggcagatgttcaaatttcacaggttttaccccccgcgcccccgcctcaagtcccgggagtggactcttcagacggtctcccttcatccaagagggcgagacctggtatccctgaagaccccgttgcaactgattttgaccttgcttcgcctgacccgattgttgctccagacatggcttcagaggctaccgggggtgccggaggcggcataaaagtaaaagctcaatggattggtgggacgtcgtttacagactctttaattcttactgcccatactcgcacttcaatgttggctgaccgtggggggtatgttccagtttaccgcaaaggcagccacacagatgagagtcagcccgttatgggcatgcgtacgccttactcttatatagatgtcaatgctatatctgcacacctcacgcccagagattttcaacaattattagatgagtatgaagaaattagacccaaaaagcttatagttggcattagtgctattgtgattaaagatgttgctaccacctctactggtactacggtttctgacagtgctagcggaggcatcaccatcttcagtgatgacggttatgagtacccttatgtattggggcataatcaagacactttgccaggccacttacccggggagaactatgtgcttccccagtatgggtatctaaccaggggacgtgagattgatagttcatcttctcatgatatagtgggcatagctgaccataaaactgaattgtattttttagaacaccacgatgctcagtgcttagggtccggggatacatggtctcatgtttatgactttcctacagatttgccttttcgtagactcagcactcccagtcaaaccttgtatgggagacataaccctatacccagctctcgtctggctataatgacaggggtagactctcaaggtaaagctgtgtggaaaagacctaccggcatggacgtgggacggttacctctcaatcatgtgccagggcctgcactcatgacccccacagacagccagttaaagaatcttactttcagagccccagtggcaataggacacccacagactagtgacagatatgctatcaatcctttggttcatcagccatggtctgtgaggacagaagatcaagatggtgggacctattcagtacacaattatttgggaggtgtggcatatacccccagattacatgaagaatcttacgagggttaccaagaggagattgatggtactgtctccaacccgtcaagggtggttgtgacagacacagacctagcagcgcctcatattgggcatacattttatgttcctgggcatcagcgagttagtggcagtggaacagagacagagtttaaccctaaattatatcaagagccagtgttccccctgtttccaggagcagtttggaatcccaatccactatcttttgactgccagatctggacaaagattccagatacagaatgtcacttctttgctcagtacccgctccttggaggttggggaatggcaaatccgcctcccatgattttcctgaaactccgtgcccaaccagggccgccttcggccggggcacatacagtgtctaagagcaacctgaaccagtatgcaatctttcacttacattattcaatggaatttgaggtaaagcgtcgccgtaggtcgcgacgccataacccagaaaagcctgcgccgttcccagtcacagagtctggacgaatgcctttcaccctggcaaatgacaaaacagatccctctaaagctgtgtatgaagttcctgcagatcaatggattgctcaaaattactcccataaattgtaatgctttaataaacgtgattatacctgatgtcattgg

SEQ ID NO: 215 - DNA, 5517 bp, Bovine parvovirus
  source 1..5517: mol_type = genomic DNA; note = Bovine parvovirus / Bocaparvovirus ungulate 1 - NC_001540
atatttttattactcatttcctgcatccaccatattggctgcccgggccaataatgcgagcggctgcgccgctgcgcgcttcgcgcgcgcattgtaaggcctaatcgggcagccaatatggtggatgcaggaaatgagtaataaaaatatagagcctgtgattaagtgaaacgacataggcgaggacaggtggaccaatcacgttaaaggtcaagctaatgattaaccggggggtggagactagagggtatataaagaaagaaccaggaagtcaaaaatcagactgctgcagacctcgacagagaacacacgtctctgcgctctggtgagtgaagatggctactggggggctagctaaatgggtgggggctgtgcaggcctttgggcatccatcttggtcctacgtcatcaagctacgtcatggtcacgtgaccatgattgagagaggcttctatgaactatgtgggggagagaattggaatatgctccacgaactacctggagacaaatggactgctggagatgtgggagagcagagagagcatgctagagagttggagtccgggagatggacacagttgggccatggcatgggcagggtggagagctgctagagagaccatgcagagaagacagtatgtcaacgagccgacatttagttgctggagccagagcgagctgggggagaacggatggcatgtgcatataattattgggggtccgggactgaccagacaaaatgcagccatctcgaggtctatactctgcacttcattcgtttaaacaccttctgatcactattagacagagaacacacgctccagacactgtgctatctagagatgagctgaatgcatggaactggctgcaaaagatagctcagagggtgatgaggggagacatggatgacattgtagacatcctgaagtgcagaaaggccaacggcacgctggtagctcaggcaatcaacggcacagaattcatcactagatatatgctacctaaaaatagaaaggtggctgacacagtcttaacgagacacactacaccagaacagagctacgactctacttggggtaaaacatacggcttcgcggtctgtaacggcgagacggtctccgagttcacaaggaaagatctctggaaagtcctttacaacatctacacagcgcatccagctgagaacatgctcaactcaaacccaagcgtgtggggagaccttccaagggtaagcgctaaccgcatcgacgcggacgacgcggaggccagatcaaggccgattaaattatccagaaaacaaaaaatcatggctgaggtgattcagcgagccactgatgggttactgttaacctacaatgatttggtggtacatttgtctgatttgatgttaatgcttgagggcatgccgggcgggagtaaaactgctgaacagctgcttaccatgattcacattaaattgtgtgccaaatacaatgcttatgaatttatgctgatgaaaactcctgctactcaaaacatgaatccgggagcaccacactatgattgccagggaaacttggtctttaagctgctcaacttacaaggatacaatccttggcaagtggggcactggttagtcatgatgctttctaaaaaaacggggaaaagaaattctactcttttctatgggccggcgagcacagggaaaaccaatctcgctaaggccatctgccacgcagtggggctatacgggtgcgtgaaccacaacaacaaacagtttccttttaacgatgcacccaacaaaatgatcctgtggtgggaggaatgcatcatgactacagactacgtagaggcagcaaagtgtgtgctcgggggaactcacgtcagggtggacgtgaaacacaaagattctagggagctgcctcagattccagtgcttctttcgagcaaccacgacgtgtataccgtcgtggggggaaacgccacgtttggagttcacgcggcgccgctcaaagaaagaatcactcaaatgaattttatgaagcagctccctaacacttttggagaaatcactccgggcatgatttcaaattggctgtctcactgcgcgcacattcaccaagaacatctgtcgctggaaggctttgctattaaatgggacgtgcagagcgtggggaacagctttcctttacagactctctgtcctggccattcacagaactggacattcagcgaaaacggcgtctgctggcactgcggaggtttcatccagccaacaccagaatcagacactgactctgacggagatcctgaccctgacggtgctgttgctggcgatagcgatacttctgctaacagtgagtctacagtatcgtttagcagtaacgactcaggactaggatccgtcacttcatcagctccatcggtacctgacagagccgaggaaatagaggagattcccagtgagtgcttggagtggatgcgggaggaggttgatagactgagcgctcacgacatcaactcactcgctcaccaagctactgggttcatcctagatcccattccagaagaaccagaagaaggggagcgggatctggctagagaggacgccgagccagaagcatcgacgagtcacactccagctaccaaaagagctcgcgtggaggaaggtgagccgtgggatggaacgcagccgatcaccgagggagactggatcgacttcgagtcgagacaaaagcgacgcagactggagcgagaggagaagggaggagaggacgaggacatggaagtccaggagtccgatccgagcgcgtggggagagaagctggggatcgtggagaagccgggagaagaaccaatcgtcctctactgcttcgagaccttaccagaaagcgacgaggaaggagacagcgacaaagaaaacaaaacacacaccgtttaacgtgtttagcgctcaccgagcactctctaaaacagatctccagttctgcggcttctactggcactcgactcgactggccagcaaagggactaatgaaatattcaatggactaaaacaatcatttcagtcaaaagcgattgacgggaaacttgattgggagggggtgagagaattattatttgagcaaaaaaaatgtttagacacttggtatagaaacatgatgtatcactttgccttggggggtgattgtgaaaaatgtaattactgggatgatgtgtacaaaaaacacttggctaatgtagacacttattctgttgcagaagagataactgattctgaaatgctggaagcggcagaagctgttgatgccgccaaccaataaagctaattcaaaaaaaggcctgacattacctggctacaattatttgggtccattcaattctttattcgcgggcgcgccagtgaataaagcagacgcggcagcgcgaaaacacgactttggctattccgacttgttaaaggagggaaagaatccctacctatactttaacacacacgaccaaaacctcatagacgaactcaaagacgacacttcctttggcgggaaactcgcaagaggagtgtttcaaataaaaaaagcactggcgccagctctgccaggcacatccaagggaggagacagagccttaaaaagaaagctatactttgcgcgctcaaacaagggcgccaaaaaagcaaacagagaacctgcaccaagcacatccaatcaacagaacatggaggtatcaaatgatatacctaacgacgaggctggcaatcagccaattgaactggcgactcggtccgtggtaggatcgggttcggtgggtggcggcggccgagggggctctggagtgggctactcaactggcggatggacggggggcaccatatttagcgagaacattgtggtcactaaaaacactcgccagtttatatgtgacatcaaaaacggccatctctataaaagcgaggtgcttaacactggtgacacggctcacaggcaatatgccattaccactccgtggagctattttaatttcaaccagtacagctctcactttagtcctaatgactggcaacacctggtcaacgactacgagagattcagaccaaaagccatgatagtgagagtctacaacctgcaaataaaacagatcatgacagacggagccatggggaccgtctacaacaatgatctgactgcaggcatgcacatcttctgcgacggggatcacagatacccgtacgtacagcatccatgggatgaccaatgcatgccagagctgccaaacagcatatgggagctaccacaatatgcttacataccagctccaatatcagtcgtagacaacaacactacaaacacagtagaagaacacctactgaaaggagtgcctctgtacatgctggaaaactctgaccacgaagtgctacgcaacgggagaatctacagaatttacattcaactttggagactgcgaatggatagaaaacaacatcacattcagcatgcctcagatgatgtacaatccactggtcagaagcagaagaatctactcatacagcggaccaaacaaccaaacaagcaacgattccagaatgcagcactaagaaccagcaactggatgtcaggaccggggatcgcaaggggaacacacaacgcaactctacaaacacaatctgcaggagcactggtgaccatggtaactaacggagcagacgtctccggggtgagagccgtgcgagtaggatactcgacggatccaatctacgggggacagcaaccagagtcagacctgctaagactgagatactccgcatcagcagcagaaggacaacaaaacccaatattagaaaacgcagcaagacacacttttaccagagaggcgagaacgaaactgatcacgggatccaacggagcagacggagactacaaagaatggtggatgctaccaaaccagatgtgggactcggcgcctatctcgagatacaatccaatatgggtcaaggtaccgagagtcaacagaaagacactcctggacacacaagacggatccattccaatgtcacatccgccaggaaccatcttcatcaagctagcaagaattccagtaccaggaaacggagactcgttcctcaacatctacgtcaccggacaagtctcctgcgaagtcgtctgggaggtagaaaagaggggcaccaaaaattggagaccggaatacatgcactcggcaacaaacatgtccgtcgatgcatacaccatcaacaacgcaggcgtctacgcaggcgcggtacaaaacgcagacgtcatgcagacgagattcaatcaccacaaagtcctgtagggggccgcaagaaaaaagtcactctatacaccgctttatatttttatacactgattcactctttccaccatcttttagttgtattcttagttatcaataaaggcgcgaagcgccataaaaaattatgtcatatggcgcttcgcgcctttattgataactaagaatacaactaaaagatggtggaaagagtgaatccgtgtataaaaatat

SEQ ID NO: 216 - DNA, 5515 bp, Bovine parvovirus 1
  source 1..5515: mol_type = genomic DNA; note = Bovine parvovirus 1 / Bocaparvovirus ungulate 1 - NC_038895
atatttttattactcatctcctgcatccaccatattggctgcccgggccaataatgcgagcggctgcgccgctgcgcgcttcgcgcgcgcattgtaaggcctaatcgggcagccaatatggtggatgcaggagatgagtaataaaaatatagagcctgtgattaagcgagacgtcatagacgaggacaggtggaccaatcacattaaaggtcaagctaatgattaaccagggggtggagactagagggtatataaagagaaaaccaggaagtcaaaaatcagactgctgcagacctcgacagagaacacacgtctctgcgctctggtgagtgaagatggctactggggggctagctaaatgggtgggagctgtgcaggcctttgggcatccatcttggtcctacgtcatcaagctgcgtcatggtcacgtgaccatgattgagagaggcttctatgaactgtgtgggggagagaattggaatatgctccacgaactacctggagacaatggactgttagagatgtgggagagcagagaaagcatgctagagagttggagtccaggagatggacacagttgggccatggcatgggcagggtggagagctgctagagagaccatgcagagaagacagtatgtcaacgagccgacatttagttgctggagccagagcgagctgggggagaacggatggcatgtgcatataattattgggggtccgggactgaccagacaaaatgcagccatctcgaggtctatactctgcacttcattctttaaacaccttctgatcactattagacagagaacacacgctccatacactgtgctatctagagatgagctgaatgcatggaactggctacaaaagatagctcagagagtgatgaggggagacatggatgacattgtagacatcctgaagtgcagaaaggccaacggcacgctggtagctcaggcgatcaacggcacagaattcatcactagatatatgctacctaaaaatagaaaggtggctaacacagtcttaacgagacacactacaccagaacagagctacgactctacttggggtaaaacatatggcttcgcggtctgtaacggcgagacggtctccgagttcacaaggaaagatctctggaaagtcctttacaacatctacacagcgcatccagctgagaacatgctcaactcaaacccaagcgtgtggggagaccttccaagggtaagcgctaaccgcatcgacgcggacgacgcggaggccagatcaaggccgattaaattatccagaaaacaaaaaatcatggctgaagtgattcagcgagccactgatgggttactgttaacctacaatgatttggtagtacatttgtctgatttgatgttaatgcttgagggcatgccgggcggaagtaaaactgctgaacagctgcttaccatgattcacattaaattgtgtgccaaatacaatgcttatgaatttatgctgatgaaaactcctgctactcaaaacatgaatccgggagcaccacactatgactgccagggaaacttggtctttaagctgctcaacttacaaggatacaatccttggcaagtggggcactggttagtcatgatgctttctaaaaaaacggggaaaagaaattctactcttttctatgggccagcgagcacggggaaaaccaatctcgctaaggccatctgccacgcagtggggctatacgggtgcgtgaaccacaacaacaaacagtttccttttaacgatgcacccaacaaaatgatcctgtggtgggaggaatgcatcatgactacagactacgtagaggcagcaaagtgtgtgctcgggggaactcacgtcagggtagacgtgaaacacaaagattctagggagctgcctcagattccagtgcttctttcgagcaaccacgacgtatataccgtcgtggggggaaacgccacgtttggagttcacgcggcaccgctcaaagaaagaatcactcagatgaattttatgaagcagctccctaacacttttggagaaatcactccgggcatgatttcaaattggctgtctcactgcgcgcacattcaccaagaacatctgtcgctggaaggctttgctattaaatgggacgtgcagagcgtgggaaacagctttcctttacagactctctgtcctggccattcacagaactggacattcagcgaaaacggcgtctgctggcactgcggaggtttcatccagccaacaccagaatcagacactgactctgacggagatcctgaccctgacggtgctgttgctggcgatagcgatacttctgctaacagtgagtctacagtatcgtttagcagtaacgactcaggactaggatccgtcacttcatcagctccatcggtacctgacagagccgaggaaatagaggagattcccagtgagtgcttggagtggatgcgggaggaggttgatagactgagcgctcacgacatcaactcactcgctcaccaagctactgggttcatcctagatcccattccagaagaaccagaagaaagggagcgggatctggctagagaggacgccgagccagaagcatcgacgagtcacactccagctaccaaaagagctcgcgtggaggaaggtgagccgtgggatggaacgcagccgatcaccgagggagactggatcgacttcgagtcgagacaaaagcgacgcagactggagcgagaggagaagggaggagaggacgaggacatggaagtccaggagtccgatccgagcgcatggggagagaagctggggatcgtggagaagccgggagaagaaccaatcgtcctctactgcttcgagaccttaccagaaagcgacgaggaaggagacagcgacaaagaaaacaaaacacacaccgtttaacgtgtttagcgctcaccgagcactctccaaaacagatctccagttctgcggcttctactggcactcaactcgactagccagcaaaggaactaatgaaatattcaatggactaaaacaatcatttcaatcaaaagcgattgacgggaaacttgattgggaaggggtgggagaattgttatttgagcaaaaaaaatgtttagacacttggtatagaaacatgatgtatcactttgccttggggggtgattgtgaaaaatgtaattactgggatgatgtgtacaaaaaacacttggctaatgtagacacttattctgttgcagaagagataactgattctgaaatgctggaagcggcagaagctgttgatgccgccaaccaataaagctaattcaaaaaaaggcctgacattacctggctacaattatttgggtccattcaattctttattcgcgggcgcgccagtgaataaagcagacgcggcagcgcgaaaacacgactttggctattctgacttgttaaaggagggaaagaatccctacctatactttaacacacacgaccaaaacctcatagacgaactcaaagacgacacttcctttggcgggaaactcgcaagaggagtgtttcaaataaaaaaagcactggcgccagctctgccaggcacatccaaaggaggagacaaagccttaaaaagaaagctatactttgcgcgctcaaacaagggcgccaaaaaagcaaacagagaacctgcaccaagcacatccaatcaacagaacatggaggtatcaaatgatatacctaacgacgaggctggcaatcagccaattgaactggcgactcggtccgtggggggatcgggttcggtgggtggcggcggccgagggggctctggagtgggctactcaactggcggatggacggggggcaccatatttagcgagaacattgtggtcactaaaaacactcgccagtttatatgtgacatcaaaaacggccatctctataaaagcgaggtgcttaacactggtgacacggctcacaggcaatatgccattaccactccgtggagctattttaatttcaaccagtacagctctcactttagtcctaatgactggcaacacctggtcaacgactacgagagattcagaccaaaagccatgatagtgagagtatacaacctgcagataaaacagatcatgacagacggagccatggggaccgtctacaacaatgatctgactgcaggcatgcacatcttctgcgacggggatcacagatacccatacgtacagcatccatgggatgaccaatgcatgccagagctgccaaacagcatatgggagctaccacaatatgcttacataccagctccaatatcagtcgtagacaacaacactacaaacacagtagaagaacacctactgaaaggagtacctctatacatgctggaaaactctgaccacgaagtgctacgcacgggagaatctacagaatttacattcaactttggagactgcgaatggatagaaaacaacatcacattcagcatgcctcagatgatgtacaatccactggtcagaagcagaagaatctactcatacagcggaccaaacaaccaaacaagcaacgcattccagaatgcagcactgagaaccagcaactggatgtcaggaccaggaatcgcaaggggaacacacaacgcaactctgcaaacacaatctgcaggggcactggtgaccatggtaactaacggagcagacgtctccggggtgggagccgtgcgagtaggatactcgacggatccaatctacgggggacagcaaccagattcagacctgctgagactgagatactccgcatcggcagcagaaggacaacaaaacccaatattggaaaacgcagcaagacacacttttaccagagaggcgagaacgaaactgatcacgggatccaacggagcagacggaaactacaaagaatggtggatgctaccaaaccagatgtgggactcggcgcctatctcgagatacaatccaatatgggtcaaggtaccgagagtcaacagaaagacactcctggacacgcaagacggatccattccaatgtcacatccgccaggaaccatcttcatcaagctagcaagaattccagtaccaggaaacggagactcgttcctcaacatctacgtcaccggacaagtctcatgcgaagtcgtctgggaggtagaaaagaggggcaccaaaaattggagaccggaatacatgcactcagcaacaaacatgtccgtcgatgcatacaccatcaacaacgccggcgtctacgcaggcgcggtacaaaacgcagacgtcatgcagacaagattcaatcaccacaaagtcctgtagggggcgcaagaaaaaagacactctatacacccgctttatatatttttacactgattcactctttccgccatcttttagttgtattcttagttatcaataaaggcgcggagcgccataaaaaattatgtcatatggcgcttcgcgcctttattgataactaagaatacaactaaaagatggcggaaagagtgaatccgtgtaaaaatattt

SEQ ID NO: 217 - DNA, 5610 bp, Bovine parvovirus 2
  source 1..5610: mol_type = genomic DNA; note = Bovine parvovirus 2 / Copiparvovirus ungulate 1 - NC_006259
acttccgggtcacgcccggtagttccgggtcaagtgacgtagttccggtgacgtgtcgctcacggctagggggttgggttacgagtgtcgaaaaaatttacataagaggaacgaatattaatgaggtggcgaaacattgtcctaatatggtgctgaacgctgattggttgtctatataaggtaacacacaacctgattggctagcgtcacatcctgataggaggtatataaagcacaacacggaagtgacagctcattcttctctcagctgtcagagagggaggacgtctcttggtgagtacaaaatgagctactacacttttgttgtaactatacctgataaaattgaagactatggacaagcttactatgatgtagttaacagagtaactttaactcatagagacaatgagaaatgggtatatgacccagaagacagggaaattatttttaaacaggctcaggtatatgttgactgcttagaaagaaggttaaaacagatgttagtgtccggaagtatgtacaattactttatacagctagagcaaggagaaaagcacaagaggtggcacatacacgtagtgttagacataagcgtgggaaatccaagaaactgtagagaagtgatagaaaaggtagaatatgaatacaacagcatttgctacggtagaccagtaagacagactcagattaatagaacaagcaacggtagttggaagatagagactgaagactttattatcaactacttactatgcaaaataccacctaaagaagctaagtatgcctggactaacattaaaaacaagataggagacgcttgtttaaacattgacttaagaaaagaaatttcagttagaccggacatagacgtaccgatgtggagacaagctagcggagacagaatgagagacttggtagaatggtgcataaaaaaccatgtatttacagaagaccaatacatggctaaatttgaagaaagctactacagctttgcatgcactaatcaaggcagacacatgctacaaacaagcttagaattagcagcaaaaaggacgactagcatgataccgctcggcgtttacttagcaggattcagtaacattcaagaagcaattgaagaggctaacaaaacagaatttgcagacatatacaacaacaaagtgtttgacttgctacagtttcaaggctacgacccagtagtagcaggatacattatatacgcttggagcatacgagcgacaggacgtagaggagccttatggttctacggaccaggacaaacaggaaaaagtataatggcaagggctatggctacatgcagcgtccgatacggctgcgtgaactggacaaactctaactttccatttcaagacttagcaacaaactgccaaataggatggtgggaagaaggggtaatcacagaagacattgtggaaagtgctaaagcactactgagcgggggtaaaataagagtagacagaaaatgtagagacagcgtagaaattacaccgccaccatttgtgattactagcaacaacgacatgacattagtgcaaggaggaaatcaagtaagctttgtccacaaaaaaccgctagaagacaggatgattaaatttaacttcaacaagagacttccacctaactttggcatagtagagagagaagacatgaaacaattttttaaatggagcagttttatctactacaacaaactgctaccaaaagaacaggcatacttaagtgatcctaaactgatagggcacgtagtcccatacacaagctttttaagacagactgcaaaagtagagaaaattgtaagaccattcgaggaacaagaacaagaagacttggcagaactagactcttggtttgcggaccccccatacatggggaagcccccaaaaaagagtgagtagctacatatattttgtactcactttgtgtgcgtgacacgtcactgacacacacgattttttgcagaagtacgctttgaggacaaacagttacttccgcaagaagaattagaccacatctgtcacaatcaagagtgctgtcaatacccatcgtgcgcaggatttcaacagtaagtgaaatcttgcattacttattgcgtaacttgccaagggcaacgacttagcaatgcatggtttcccttgcaggccgccgaccacctcttcacacctaccagaactcacagacgaagaagtctgtagcatactagatagtgaagaaggctgggacggggacaactttgcagaacagtaatggccgctaaactgggagggggcttagtaggggaagcagctatacaccgcatagaaagcttatcaggcaaagtacactataaggacaaatactggtttccagacaactacgtatatacaacaggaaaccaagaggaagaagacaaaatagtagcaaaacttttactagatcctaatgcaccagttaaagaatggggaaacggcaggtggtcctttgaatacggaccagaatggcgtagactgggctttataccacacacagatgacattaattaccgcggactctcataccacaaagcacctgggacacagctgctagaaggtatacacgagatacctccagaacagaaacaaggccctgaaagtataacacaaatagcaccacccacacaagactctgtactgttagagcccatgacaaatgacccacactataaaaaaccaaaacctccgggggacttaggagacattccaaagccgctcacaccatggcaactggcaaacaaaatagggccagactatgcaaggcaattattgacgatgtcgggacacgattttactggacgtacacccccagtacaaattcctgaccctggcatccgagaaggcctaaaagaattggaagaacaaagtaaactcatggaaagagtacaagccggtgaaggggacgaaaaacccagaggcggtcttactcttccaaaacacaggtatgtcggacccggaggggacctcccggcagggcgtccaatgtccaaactggatgaaattgctgctcgacatgatattgggtaccacactgaaataaaacataaacataacccttattactggtataacttttacgatgagcaaatggttaaagaaataaatgaaaacatggaccaaatagcagaggaaggggaatcctggctagcaaactttatacttgctacatggaaagccaaagctagctttactaaccctttaggtatattattagaacacttacaaccagattgggctacatactatgacccagcaaacacacatcataaacaatggattgcatttcagcgtgccttaacacagcacgggacagcgtcgacggagcgaccgaggacacctccgaccccggacaacgagatgtttccacacttggctaaacgaccccgactagatgaacctaataaatctgcttcttgctctacagacatgtcgtcctgtgaaatttcttccacacaatgcacaaacgacgaagacatggagctcaaccagactacagtcatggggatgccaagttcaactacagacagcacaatcgggaacactgggatccagggcacaggtgactgtgcgggaggcggggggggagcgcaacgatgtaccaacaaatggttagggggaatatcatggacgcataacacatttaccacataccaaacacgacgatgcatactgcaaccgtttacaaacaaatacacatttacaagcagtgtagatagcacaccaggaattacagtaaccacaccatggtactacatagacttaaactgcttctacagccacattcctccatctacaatgcaagaaataattgaaactacagacggctttaagccgttaacattaacagtaacaattacagaaattgtgggaaaagacgtaagctgcacaactacatcatctggggtgccaaacacagttacagactcacaaacagcaactttgctgctacacagggacgatcactacgaactgccatacgtgattggcggtggacaagaaacagtgcctgagcacttaccaggggactggtacaagctgccacaatactgctacacaaccgtaggcatggaaagtccatggggtaactggtcacaagcgcgaccagatgactgcgcaggaaacacctggtcggttaattgcacaaactactacagtacacaagacagtgaactatttctactagaaaacttagtgaacacacaactgcatccagggtgctcctggacgtcacaataccactttccacacttacctatggcatacactacacaatacccgtggagcacaagacggcaagacaacccatgtcaaaaacaaagaatagtggctgtacgaaactgttgctccacaacaaatacagacgccaacaaacgccaggttatagaggtagaccaggaccaagcagacatgggttttttcagaaagccgacaatgtggttgccggctaacagacacagagacggcgactgccaaatcatccctcccaaaggcagagaataccacgtactaccagttagatcaggactcccaccagtcatagttgtacgacagggaatttttaacccactcccagcaagtggtgtttttggcttaacctcgggaacagaacagccagggccaccgacagaagacaaagcagtcattacgccaggaggcaccacggtgcttacatctaacacactaacggtgaaacgcaaacacaaatacaaaaaccaaaaccacgacgtgcacacagtatacgaaggcaaacaagaacaaaaacgcctgtaccaactggtggtgcagcgagaaaggggagttggaggaccagcagagcccaaccacgtacaagagcgaattataggtagcaccggggaaaaacttccgggcagcagatacccgctacaaagcgaaattacatacgggcaacacacaggggctgtagaagagagtgagtccgggttctacgaatttcaaatctgggagagaaatccaaacacagacctagggaaagggggacacaaaccacccttagctcagtgggctatggaaaagccaccgcctacaatatacctccgaatgcttcctatgccctgtgcgccttgcaaaaacaaatacacaaaaagtccaggaatgaaaggagttataaacagctacattacatttcagctacagtactctatcaaatgggcttatactcctaggacccacaccagaaggtggaaccctaccagtccagcacttcttccaccaccacttcctggttctaccgtcgtgtacaaccttgactcccagaagttcaccaccgacaatcaatacaccatcgcagcagaatcctggcaattcaaaaacagattgagacataacagatgattacgtagttgttgtcatagcttttatgtccatgtacttttatttgatcttgttgtgtattttaaatcaaaatgatttgatttgattttaacttaatttgatttgatttgatttgatttgattgtatcacaaatattcttgtgaaagaaataaagaaaaagaaaacccaagacatccgagtgagctaccacgctggtgtcccgcgcctttggcgcgggacacccag

SEQ ID NO: 218 - DNA, 5276 bp, Bovine parvovirus 3
  source 1..5276: mol_type = genomic DNA; note = Bovine parvovirus 3 / Erythroparvovirus ungulate 1 - NC_074970
cgatctagtgacgtcatgctggcgctgtgccaagctccgcccttggcgcggcgccaggcgagggggatgattagtagcttacaaccagcccttgtgggcgtgtctgggcggggacatgcaaatgagcaaagtcgccctaagtgaacacgcggacgcaaataagctctcgccgcacctctttttgctctttaccgtcctcggtactgagctgtaacacttgagctgtaacactcgagctgtaacactgcccatttgctgagatggagtcctactcccgcgctgtaattcgtctgccatgggaaaacatctacgaagccattcaagaggctgcgtggccatctttggctgccctggaaccccaacgaccaggagatttgccctatgattggcccctactttatgatgaagatcggcgatacgtggttgcctgtgatgcgttctggcaaatcctccaacgacgagcagcagtctttggtcgctgggctggctacctacaactagagccatctcaggccggcggccctgggcgacatctacatctgcttttaggcgctccgggtattcgagggcgaagttggacggcgtttctccgcaacgctgtggcagaatgggcgcgtaccaccgttcatctgaactacgctgatgccatagacatcccacggaacactcacggaagaattctagaggcggacgccgactttgtattcaggtacctggcccctaaacttccacttagagaggtcacatgggcatggactaacgaggatcaattcaaaccctttgctctttgcgagcctaagcgccgcgagcttattcagcgagctacaacccaagatcgagccaatggcctagacgggccacccgctaaaagaagccgagccgcagatgagtttcaccaactggtccattttttagccgacaagggcattgtggaccctgataaatggatggctttattccccgatagctatattacctggagcagctccgctcagggcaggcagcaagttaacagcgcctgtgaattggctcttcaaattatcctgacgcgcggcgtattgtctagatttttggcgccgaatccatccaccgtcttccccgaaggcaatagagcagttgaacttttgcgtatgcaaggccatgatcctgtttcctttgggaagctagtactagcctgggcagataagcaactcggaaaacgcaacactttgtggttttggggtcccccgagtacaggaaaaactaatcttgccttagctatcgctagagctctgccgcggtttggtatggtcaattggactaatgaaaattttcccttcaatgatgcgccgcataaatgtgtcttggtgtgggacgaaggccgaattacggccaaaattgttgaggctgtaaagagcattctggggggtcaggcggtgcgggtggatcagaaatgcaagggctctgtaagcttgtctcccactcccgtattaatcacatctaatgctgatattcgatatgtgcgtgatggaaacattgttactggggatcatgtaaaagctttaagtgagaggatggtcattgtacatttctctactccgtgccccgccaattttgggcttttgaaagcggaggaaattgttgattggctaaactatgtaaagtcatgcccggggagtatcactgctgataccgttcaggccacgtggggaacacgctccgcccccaatttatttgagataaagcggaaagccccacagcccgccagtcccattgaacctcagacggaggaacaagaagaagcagccgcatatcgctgtctcagcagtcccgcaagcagtcgcagtagctcgccagacatctttggaatcacgaagagccccgctcctctggaggacctttccagcgacagcagcagtgagtgcagcttacctttcacccccagtaatgcggcatggtttactcccatgccgcctgcccgccccttagagccccctctttttggagtagattggatctactctacacaatggaaacaacctgtgtgttgtttagatcatgaaactgaaccttgtaatttgtgcatagatatagcggagcgctgcgtcttgtttcgggtttccgaaccagatcttctacggtgcccagatcaccggcacgaggagaacccgtttgacgtcttgctctgccggcactgtcaagctctttctgggttagaaacgctgcaatctgcttaggtatggcgttcaaccccctgactatgtcctctcgcttgctgatacctgtcacgcctgtaagcaaattagacctactcaaaaaaaagtggtttgcttttccggatgtatctaaaattttacttgaagcattgtcacattcggggtttggggacccaaagaaatggaaggaagccgatgctgatattattgaagctttgcttgatgaggccttgcgcctagggccaagattagagaaaccaagttggttttatgacttgcaaagagctattggactggctagattttcagcttctctagaacaaaccgtgtttcttaatgaaatgctaataaagcttacgcgtggtcctgttgtgccgaaatatccagagccagatatcgttattcgggaccctgcccctgtaagccaagatgtcgaagccccggcctctactcccgaaaattcctcagatgagtcttctactgtctccaacccagtagaaatggaagaagatccccctaatcctattcctgtcccaacaccccaatcagaagacatggaaacagaagaagtagccattcccaatcagcccccccttccctctcccccaatagtagatgaggtagaggacatgacagtgggagtagaagacctttctattgtagaagatgcctccgagcaacaccagtcatctgcaggggagcctgccccagatatcacatcttctgtcggaaacagagatgatgaatctagagaagagtctagagaggctgatttacaagatctgtctgctggcctgggagctgccgggggtagcgctattgctgctcttggtagtgggcttattcctgcggcgacggtggccacagcatatcctcggcctgatcagttcttgcgggactacttggcccggtatgatcaaatgtatcctagtgggtcccggtatcccccacgatgggaacagttaaaatccttgtatgacaaggggatgacagttaaggaggtctgggaccttctcaacaaaaattccaataactctaacttacaggcaaaggataccgacaaaaagcagacggccccgtcctcgcccagtgctcctcaagagagtgcagcggccatggcttcgggagataagtcgggcgtgaaccctagcggtgggagtgcccctttatcggccactgtatgggcctctggagctcaattcgaggctgatcatgtgatcactcacatgagccgcaccgtcttcatcccctttcagcaagcacaccgctatgagcctatagtttggcgcgggagacgcaccgcagacggctggctgtcattttggcctgatcaccctgtcatcggctataaaaccccatggttctacctggacgtcaacgccatcaatcgccatttttctcctggcgagtggcaagaggtactagaaagatatggtagcattgtaccagagagcatggaaataatactgtccgatttctgtattaaagatgtgagtgtagtggacggaaagaccacagtaactgacagcagcacgggcggagtgtgtgtgtttgtagatgacggctacaaatttccatatgtactaggtcacagtcaaaatacattgcccggcccattacccacagatatatattccccgcctcagtacgcttaccttactacagggaaaaaaaccaaggtagccgcatatgcctctggagaaggtccaatgcccatggattctattgcaatcccctctcaggaaactgctttctatgttttagaaaactccttttacaccattcagcgtgccggagggggattcgcccactcttataacttcccctctttaaagccaatttccttagaaggattttctcaacactggatgctcatggacaaccctttatatccatcccgcctgtgggtgcctgaaaaagtggggggcgcttctaaatggggggcagtgaaaaatgatgattacgggaaaaagcccttaaattggatgcctggtcccaacattccctcccacactatagagcagagtgatcaagctggacagagggttgaattggatcgagatgtcgaaggtcaaaaagtgtggactggcacttccttcggcagccgtccagaaaatagatggtctatgcggccactgggtgttaatcagccttatgcatatgatgcttatgaagatgaaacagataaaatagtgacagtggatgccattgggtacggaaccgctaaggcatcagcggctctaggccaagatacaggggaagttccagaaaatgcatccgtgggtcgcgtcccagatgacactgaatgtaataaacaagggggcggaggaaatcacctgtttcaagttaagtctttggcccacaataattttacagagcaaatgaaaaaccaaacagtgcccttgatgcccggcagcgtttggcagaatcgcgctctgcattatgagtcgcaaatatgggctaaaattccaaatgtagatggtgagtttatgtgtgagcgaccagcattgggtggatggggaatgcacgaccctccacctcaaatatttatgaaaatgcaacctgtcccagctcccaagtcattaaattccaccacagaggcagggtttccctcagagcattacctgcaccagtatgcgtactgtgtcatgactgtccgcatgcgttggaaaacaacaacccgcacagggcccactcgttggaaccctcaacctaccttcggacccccagaggctacagaccacataccctacattctgtatgaccgactgtcaaccatacacaaaacacgagggcagttcactaatgcttactatgaagagccagagagtgtgtggaccgctcggggacgggtgcgtcacctgtgagttgctttgtctgtttttggaacgcttttcaataaactgagtggccaagagcttatttgcgtccgcgtgttcacttagggcgactttgctcatttgcatgtccccgcccagacacgcccacaagggctggttgtaagctactaatcatccccctcgcctggcgccgcgccaagggcggagcttggcacagcgccagcatgacgtcactagatcg

SEQ ID NO: 219 - DNA, 5100 bp, Bovine parvovirus 3
  source 1..5100: mol_type = genomic DNA; note = Bovine parvovirus 3 / Erythroparvovirus ungulate 1 - NC_037053
gctgtaacactgcctcctcgctgcgatggagtcctattcccgcgctgtgattcggctaccatgggaaaacatctacgaagccattcaagaggcggcgtggccatccttggctgctgtggaacctcaacgaccgggagatttgccctatgattggcctctgctctatgacgaagaccgtcgatacgtggtggcctgtgatgctctgtggtcaatcctccaaagacgcgcggcagtcttcggtcgctgggctggctacttacaactagagccatctcaggccggcgggcccggccgacatctacacctgcttctaagtgctcctggcattcgaggacgaagttggacggcatttctccgcaacgctgtcgcagagtgggcgcgcaccaccgttcatctcaactacgttgatgccatagacatcccacggaacacgcacggaagaattcttgaagcggacgcggactttgtattcaggtacctggctcctaaacttccacttagagaggtcacatgggcatggactaatgaggatcaatttaaaccctttgctctctgcgaacctaagcgccgagagcttattcaacgagctacgacccaagatcgagctaatggcttagacgggccacccgctaaaagaagccgagcggccgatgaatttcatcaattggtccactttttagctgataagggcattgtggatccagataaatggatggctttattccccgatagctatattacctggagtagctctgctcagggcaggcaacaggttaatagtgcttgtgaattggctttacagatcatcctgacgcgtggcgtcttgtccagatttttggcgccgaatccgtccaacattttccccgaaaataatagagctgtggagcttctgcgcatgcagggtcatgatcctgtttcttttgggcaattagtgctagcttgggcggacaagcaactaggcaagcgcaatactttgtggttttggggtcccccgagcaccggaaaaactaatcttgccttagctattgccagagctttgccgcggtttgggatggtcaattggaccaatgaaaacttccccttcaatgatgcgccgcataaatgtgtcttggtgtgggacgagggtcgaataacggccaaaattgttgaggctgtaaagagtattctggggggccaggcggtacgggtggatcagaaatgcaagggctctgtaagtttgtctcccactcccgtattaattacgtctaatgctgacattcgatatgtacgtgatggaaacattgttactggggatcatgtaaaggctttaagtgagaggatggtcattgtgcatttctctactccatgccccgccaattttgggcttctgaaagcggaggagattgttgattggctaaactatgtaaagtcatgtcctgggagtatcactgctgataccgttcaggccacgtggggaacacgctccgcccccaacctatttgagataaagcggaaagccccacagacggccagcccacttggacctcaggcggaggaacaagaagaagcagccgcatatcgctgtcccagcagtcccgcgagcagtcgcagcagctcgccggacatctttggaatcacgaagagccccgctcctctggaggacctttccagcgacagtagcagtgagtgcagcttacctttcactcccagtaatgcggcatggttcacccctatgccgcctgcccgccccttacaaccccctctttttggagtagattggatctactccacacaatggaaacaacctgtgtgttgcttggatcatgaaactgaaccttgtaatttgtgcatagatatagcggagcgctgcgtcttgtttcgggtttccgaaccagatcttctgcggtgcccggatcaccggcacgaagagaacccgtttgacgtcttgctctgccgccactgtcaagctctttctgggttagaaacgctgcaatctgcttaggtatggcgttcaaccctctgactatgtcctctcgcttgctagtacctgtcacgcctgtaagcaaattagacctgctcaaaaaaaagtggtttgcttttccggatgtatcgaaaattttactcgaggcattgtcgcattctgggtttggggatcctaaaaaatggaaagaggccgatgctgatatcattgaggctttgcttgatgaagcgctgcgcttagggccaagactagaaaagccagcctggttttatgatttgcaaagagctattgggttggccaggttttctgcttccttggagcagaccgtgtttcttaatgaaatgctaataaagcttacgcgtggtcctgttgtaccgaaatacccagagccagatatcgtcattcgggaccctgcccctttgactccagaggtcgaggctccaacctctacccccgaaaactccccagatcagtcttcagttgcatcagacccagtagaaatggaagagggttcctctactcctattccggacccagtgccccagtcggaagatatggagacagaagagacaaccattcccgatcaacccccccctccttctccccaaatagtagacgaggtagaggatatggcgatgggagtagaagacctttctattgtagaagatgcctccgagcaacaccagtcacctgcaggggagcctaccccagatatcacatcttctgtcggaaacagagatgatgaatctagagaagagtctagagaggctgatttacaagatctgtctgctggcctgggagctgccgggggtagcgctattgctgctcttggtagtgggcttattcctgcggcgacggtggccacagcatatcctcggcctgatcagttcttgcgggactacttggcccggtatgatcaaatgtatcctagtgggtcccggtatcccccacgatgggagcagttaaagtccttgtatgacaaggggatgacagttaaggaggtctgggaccttctcaacaaaaattccaataactctaacttacaggcaaaggataccgacaaaaaacagacggccccgtcctcgtccagtgcccctcaagagagtgcagcggccatggcttcgggagataagtcgggcgtaaaccctagcggtgggagtgcccctttatcggccactgtatgggcctccggagctcagttcgaggctgatcacgtgatcacccacatgagccgcaccgtcttcatcccttttcagcaagcacaccgctatgagcctatagtttggcgcgggagacgcaccgcagacggctggctgtcattttggcctgatcaccctgtcatcggctataaaaccccatggttctacttggacgtcaacgccatcaatcgccatttttctcctggcgaatggcaagaggtactcgaaagatatggtagcattgtaccagagagcatggaaataatactgtccgatttctgtattaaagatgtgagtgtggtggacggaaagaccacagtgactgacagcagcacgggcggggtgtgcgtgtttgtagatgacggctacaaatttccctatgtgctaggtcatagtcaaaacactttacccggcccattacccacagatatatattctccgcctcagtacgcctaccttactacaggaaaaaaaactaaggtagccgcatatgcctctggagaaggcccaatgcccatggattccattgcaatcccctctcaagaaactgccttttatgtcttagaaaactccttttacaccattcaacgtgccggggggggatttgcccactcttataacttcccctccttaaagccaatttccttagaaggcttttctcaacactggatgcttatggacaaccctctatatccctcccgtctgtgggtgcctgaaaaagtggggggcgcttctaaatggggagcagtgaaaaacgacgattacgggaaaaaaccattaaattggatgcctggtcccaacattccctctcacaccatagagcagagtgatcaggctggacagagggttgaattggatcgagacgtcgaaggtcaaaaagtgtggactggcacctcctttggcagccgtccagaaaatagatggtctatgcggccgctgggcgttaatcagccctatgcatatgatgcttatgaagatgaaacagacaaaatagtgacagtggatgccattggctacggaaccgctaaggcctcagcggctttaggccaagatacaggggaagttccagaaaatgcatccgtgggtcgcgtcccggatgacactgaatgtaataaacaagggggcgggggaaatcacctatttcaagttaagtctttggcccataataactttacagagcaaatgaaaaaccaaacagtacccctgatgcctggcagcgtttggcagaatcgtgctctgcactatgagtcgcaaatttgggctaaaattccaaatgtagatggtgagtttatgtgtgagcgaccagcattgggtggatgggggatgcacgaccctccgcctcaaatattcatgaaaatgcaacctgtcccagctcccaagtcattaaattccactacagaggcagggtttccctcggagcattatctgcaccagtatgcgtactgtgtcatgacggtccgcatgcggtggaagacaacaacccgcacagggcccactcgttggaaccctcaacctaccttcggacccccagaggctacagaccacattccctacattctttatgaccgactctcaaccatacataaaacacgagggcagttcactaatgcttattatgaagagccagagagtgtatggaccgctcggggacgggtgcgtcacctgtgagttgctttgtctgtttttggaacgcttttcaataaactgagtggccaagagcttatttgcgtccgcgtgttcacttagggcgactttgctcatttgcatgttcccgcccagacacgcccacgggggctggttgtaagctactaatcatccccctcgcctggcgccgcgccaagggcggagcctggcacagcgccagcatgacgtcactaaaatgacgtcacttccgcttccgggtcaaggggaggagcttggcagaatgccaggcgcagtctg

SEQ ID NO: 220 - DNA, 4733 bp, Bufavirus 3
  source 1..4733: mol_type = genomic DNA; note = Bufavirus 3 - NC_024888
atggctctcagcaaagatgtcatggatggcatagactggattaaaaagaaaagagacaaacaaggcctaagttttgtcttcaaactaaatgatcttcacttcaaaccaactaaagatggacaaggagtcaatatcacctggaaagactacagaaaaaatccaagaaatgatgaaatcaagcaagtaattgaactagaccaacaaactgtgagtaacagggatggggatgaaaccaaaaaaatctctatcatgaatccacctcacagaaatgcaatcatactcacagggttggtaaaaaaaactctatttgactatttcaaagtaaaaaacattgaaccaaatgaagttgattggtttatacaaagtgaattaggaaaagacacaggcctacacatccatgtactagtctgcagtgacaaaatcaacaatcactcaggcaaatggatgcaaaaatactttgcagaaaaatggggcctatacctaacactggtgcttgctatggacagtgaacacttacaggccttactgcaacaaaccaaattcagaaaacaagttgaagaaaatgaatgggttgatgtactaaagtacactcatccacaaaccaaaaaagcatactgcaaaaacatcaactttggtgaaatgattgcaaactacttcttaatcaaaaaaccagtaataacaaatgatgacaaaggctacatctacagtgtagacagtggattcaaacttaacaatctaagcttcaatgacagatacttagttgctaggcactgtcaaaatctcttccggagacaagatgacagtgaactaaccacaatccaaccacaacaaaaaaaaatgaaaagaatggtgtctgctaaagaaaaatctattaaagagacagtagacactttaactgacaaaagaatcatcaccagagaaaaatggatgctccaagatccagacagctacatccaattcatagcacaacctggtggtgaacaaacctgcagtgctgtcttagacatagcaaccttaagaattgcaacagaaaaaagtgcctatgacctaatcaaagaacatccaggcaaacttaaacatataaaaaaaaccaaagcctggaaactaatcaaaaacaacaacatgaatccacaaaaagtctaccatgcaataatgtgctgccttaacaaacaaatgggcaaaagaaataccatcttactctgtggacctgcaagcacaggaaaaagcctactagctcaaaaaatagcaaaattagttggtaacacaggctgctacaatccaagcaatgccaacttcccattcaatgactgtgtaaacaaaaacctaatctggatagaagaagcaggcaacctaggcactcaagttaactctttcaaagccatcatgagtggccaagcaatcagacttgaccaaaaaggcaaaggcagcaaatcaattgaaccaactccagtaatcatgacaaccaatgaagacatcaccaaagtaatagttggcacagaactcaaaacagaacacagacaaccaataatggatagatgcttaagaattgaactcaaaaacaaactaagtggtgatcatggcttgttagaagatactgaactaccagctatcttcaaatacctagaaggacatggattttatccaaccatgtggtcatacatggacagatggggaaccacgcctacatggggcgaaaactggaatacaaaagctaaagaagcatcttcacatctcattgaacaggagacagaagaagaagaaggaccttctgctcctccaaacacaccaacagaatggagtgcatcttcaactgcacaatcaactggtaaatcaaccaaaccaactctagctcaaagccttgatccagatgatcaagaatttgctcttctcctaaaagacattgaagaaactgaaagagcacttgaaaccatccaggaagaagaggagaacattgaagaattggcggcaacaggatatggccaaccactgttctccggtccggatgtgaatgccagcaattagaaaagctagaggtaagtttcactttctcattataacactaaccatggaggagctaaaacaactctggcgcgctctacctgtcttactaggcttctgcctaatgctaatcttcttcctattcttcctatggactttcctaagttcctactgcaactggaacaccaaaggcaacttagcaagacaactcagctctcctaaagcaagaagcaaaagaacactaatgatgagctttctaccaaccttactaagcttaactcttgtcttgctaatctggggcctcttcatctggcttttctactttgacaaacaaaggattataaatgctataataataaaaaatgaaaatggtaactatacttttaccatacaacctctttaggctgggttccgcctggatacaactacctgggacccttcaatcaagacttcagcaaaaaaccaaccaatccatctgacaaagccgcaagaaaacacgatttggaatacaacaaactcatcaaacaaggacacaatccttactggaattacaatcacgccgacgaggactttatcaaagaaactgaccaagcaacagactggggaggaaagtttggtaactttatctttcgcgccaaaaaagcactagctcctgaactggcgcctccaactaaaaagaagacaaaaaccaaacacaccgaaccagaatacagccacaaacacatcaaagcaggcaccaaaagaggtaagccattttatctctttgttaaccttgctagaaaaaaagctcgcatgtccgaaagcaatgaaattgacgagcaaccagctgaacaacagccactggcagcaactgctgctaaagctggaggaggtggaggtggaggtgggagcggtgtcgggcacagcactgggaattacaataataggactatatttcattatcatggtgatgaagttactatcatctgccatgcaacaagacatattcacctcaatatgtcaccaacagaagaatacaaaatctatgacacaaaccatggaccagaatttccaaacacaggagaccaaacacaacaaggcagaaacacagtcaatgatagctaccatgcaaaagtagaaacaccatggtatctaatcaacccaaacagctggggtatatggttcaatccagcagactttcaacaactaattacaacatgcacccatgtcacaatagaaactctaactcaagaaattgacaacatagtaatcaaaacagtaagcaaacaaggctcaggtgctgaagaaacaacacaatacaacaatgacctaacagcactgctcgaagtagcactagacaaaagcaacatgctaccatgggtcgctgacaacatgtacctcaactcacttggttacataccatggagaccatgcaaactaactcaattttgctatcacactaacttctacaacacaatcaacttactagaaggaacacaacaaaatcaatggtctcaaatcaaagaaggcatccaatatgacaacctacaattcacaccaattgaaacatcagcagaaatagacctactcagaacaggagacagatggacatcaggaacataccacttcaaatgcaaaccaacacaactattctaccactggcaatcaaccagacacatcggagcaccacatcctacaacctcaccagaacaagaaggacaaaaaggacaaatcatccaagacacaaatggctggcaatggggagacagagacaatccaatctctgccagcacaactgtaaaagactttcacattggctacagctggcctgaatggagatggcattacagcactggtggaccatccatcaatccaggcagtgcattcagccaaactccatggggttcagaagtaggaggaacaagactaacacaaggtgcatcagaaaaagcaatatttgactataaccatggagaagcagaaccaggtcacagagaccaatggtggcaaaacaatgcacaacaaacaggacaaacaaactgggccatcaaaaatgcacaccaatcagaactcagaaatgccacagcaagcagagaaacattctggacacaagactaccacaacacattcggaccatacacagcagtagatgatgtaggcatccaatatccatggggagcaatgtggggaaaagaaccagacacaacacacaaaccaatgatgtctgcacatgctccattcacctgtcaaaatggaccaccaggacaattactagtcaaactagcacctaattacacagactctttaaacaatgaaggacttcaaaccaacagaatagttacttttgcaacattctggtggacaggacgctgcacattcaaagccaaactaagaactccaagacaattcaacgcataccaacttccaggaataccatcaggaaccaatccaaaaaaatttgtaccagatgcaattggaagatttgaactaccattcatgcctggaagagcaatgccaaactacacatactaacaatgaacttactaaccatccttatcattttacttagttactgttactttttatataacttttataacttctttaataaattaataagatacttacatagtttataagttagtttataagttagtttataagttgtacaacaaggtgctgctattcacaatgtgaaactatccaactacccttaccatagtaagctggacttactgtattaatcaatctaacat

SEQ ID NO: 221 - DNA, 4395 bp, California sea lion adeno-associated virus 1
  source 1..4395: mol_type = genomic DNA; note = California sea lion adeno-associated virus 1 - NC_038539
tatatagcatgactcacatgttacgttgctgttatgtgtcgagcgagcgagcgagcccaggaggcaggagggggattgcccactctctcaaaagggactgaccattcctgactcatgcctgacctttgttcttctagtctgttcttttgctgacacatttcttatatgttacatattaactatggggtgactgcttttatccaatgagacacagggcgttgccctgcacatgggtatatctgtccgaatgagcgagcgctcagtacagagcgtctctgcttgttaacaagatggcttccttctacgaggtggtggccaagatccccagcgacctggaggagcaccttcccggcatctgcgatgactttgtctctgtgattatgagcaaggagtggcgtttgcccgagagctccgaccttgtcctggaccagattgaccagccgaagctgactatcgcggacgccgtccgcaaggtcttttactttgagtggctcaagtactgccgcgacgtggaagagcccttgttctttttccaatttgagaagggcaaggagaactttcacgtccacatggtcatcgagacctccaacgtgagttccatggtcctgggccggtacattggtactattaaaaagaagctggtccgcaaggtgtttcgggaggtcgagccccagatgcccgactggctagccgtgaccaagactaagcaatccgggggcgttaacaagacctacgacaagggctacattcccgcctacctgctacccaagacccaaccggagcttcagtgggcgtggacaaacatcgaagagtataagagcgccagcctgaacctggccgagcgcaaacggctggtggatgagttcctggcttcgcttcgccgcgacggcccgtctcagagcgagcctgacgaccagcagccccacggaccggtcatcagaaaccggaccagtcaaaagtacatggctctcgtgtcctggctcgtggagaatggaatcaccagcgaaaagcagtggatccaggaagaccaggaaagctacctttcatttaatgctgcaggcagctctaggagccagatcaaatcggccctggacaacgccagtcgaatcatgtctctcacaaagaaagcctctgactatctcgttggacagtccgtccccgaagatatcacagaaaataaaatctaccagctgtttaaaatgaacggatatgaccctgcttacctgggctccattttgctgggatggtgccagggcaggtttggcaaaagaaacaccgtctggctgtatggacccgcgacgacgggcaagacgaacctggcggaggcgattgcgcactctgtgccattttatggttgtgtcaattggaccaacgagaactttcccttcaacgactgcgtggacaaaatgctcatctggtgggaagaaggaaagatgacgtccaaggtggtggaatcggccaaggcgatcttgggcggatccaaggtccgcgtggaccaaaagtgcaagagctccgtgcagattgactcgaccccggtgatcatcacttccaataccgacatgtgctgcgtgattgacggcaattcaaccacgttcgagcaccggcagcccctcgaggaccgcatgttccgcatcaacctcgaacagagactctcccatgactttgggaaaattaccaagagggaggtgcgggaattcctagcctgggcgcaggaatatgaagtagacgtagagcataccttcgaggtgactaagctggcgaagccaaaggtcactaaaaggtccgcccctctgtctgatgactataaaagcccggcaaagagagcgcgcctcattcccgatcttgtcgcggaggaggcaacgtcgagcgctctagccgaggccgaggagtgggacctaaactgggaccgaaggtacgactgccgctgtgaggcacactctatgtctgtgcgggtagaggggctgtgtcgggactgtgaatatctgaaccggggaaaaaatatgtgtcttgttcacggggacaccgggtgtcatgtctgtcatgccgtccccccttgggtgtctgatcctgatgattgtactgatgagcaataaaagttcaaaattctaaactgaaatgtagccatgtcttctttgtttaaagagtacctgcagagtaccggactggtgggtatccagtcgggagcgccgaagccaaaggccggccagcagaagcaggatacagggtcctttgagtggaaaaagaaggaggacacagccagagggctggtccttcccggttacaagtacctcgggcccttcaacggtctagagcggggcgagcctgtgaatgccgcggacgccgcggcccagcgacacgaccgacagtacgatcgtattctacaacaagggggtaatccatacctcacgtacaaccacgccgaccgagagttccaggaggagctccagtctgacgagtcttttgggggaaatcttggcaaggctgtgtttcaggccaagaagcgaatcctagagcccctcggtctggttgaagaggatccctctcagccagattcgtcctcggacaacacggcgccacccgtgaaaaagtcccgtctcgaagaagcccagcccattcaaagtccagacgtttccagcagcactggcggaggaattgccgacgtcatgtctggagatgctgaaatggctgcagtgggcgggggagcaccgggcgtcgacggccagggtgccgagggagtgggtacttcctcgggtaattggcattgcgattcccagtggtcagaaggacacgtcagaaccaccagcaccagaacctgggtgttgcccagctacaacaaccacctgtataaacggcttggaagtagcgcacaatccaatacctacaacggattctccaccccctggggatacctcgacttcaatagatggcactgtcacttcagtcctcggaactggcaacgtctcatcaacaacaactggggcatcagaccaaaaagacttaatgttaaattgttcaacatacaagtcaaagaggtcacgacggaaggggggacgacgaccgtcgccaataaccttaccagcacgattcaggtgtttgcggacaacgcgtacgaactcccgtatgttgtcgacgcgggtcacgagggggcattgccgccgttcccaaacgacgtgtttatgattccccaatacggatactgcgggctggtgtctggtcaaagtcagaatcagtcggacttgtgttcgttttattgcctggagtattttccatcccagatgctgagaacaggaaacaattttgaaatgaatttcaggtttgaagacgttccatttcactccatgtacgcccacagccagtctctagacaggctcatgaatcctttaattgatcagtatctgtggagtctaaaacaaacaggaaacccgactggatcaacaacgagagacttaaaatttatcaagaacaaagttcccaattttgcacattatggaaaaaattggcttcctggaccttttattagacaacaggggtggacaacacaaaatattaataatagtgttgttaattttaatgacatgctgggaaaaaattcgacatttactttggacactagatggagttcattagcgcctggtccgtgtatgggggatgacggacgaactccatccaccaccaagttctcaaatgctcagctcatgtttggatctggaacacaacccaccgaaggcggtgaagatgctgtacatattacatccgagtcggaggtcaaggcaaccaacccaactgcaatcgatgaatacggacgagtggccgataatacgcaaaatgcaacaaccgccccaaccacagtgggaaatgctgcaatgggggccatgcctgggatggtgtggcaagatagggatatctatcttcaaggacccatctggggaaaaataccccatacagacggacattttcatccgtctcctctcatgggggggtttggatacagaaaaccccctccgcaaatttttattaaaaacacccccgttcctggaaatccggcaactacattttctccaaatagaataaacaatttcattactcaatactcaacgggacaagtgaccgttactattgactgggagctgcaaaaggaaaactcaaagagatggaacccagaagtacaatttacatcaaattttggcacggtcgattcactaaactgggcaccggacaacgcgggaaactacaaagaaccaagggtggtggggtctcgattccttacgcatatactataatcatacccaagtatgttgcatatcctcaataaaccgtgtattcgtatcagttataactacgtgtctgtctttcatgagtcatcaatcagacgtccctttgagagagtgggcaatc

SEQ ID NO: 222 - DNA, 5263 bp, California sea lion bocavirus 1 5
  source 1..5263: mol_type = genomic DNA; note = California sea lion bocavirus 1 / Bocaparvovirus pinniped 1 - NC_038535
ccaatgacgtatacaacaacatatgcatataaagattatatcaaaagcgaaagcacccaggtaatgagtaaccaataaagttcatagtccgtgttaatgaataaccagacagccaatcaggaaagagcacgcccatggggtgatgggcggagaggggcgttactgggcggggaaatgggtatataatcgcgtgcacatccgggttcgagtcattctgcttccgggactcgtcggagacagatcgctctgggtgagtgatggcgctgcctctcgctactactgctgatattattcagtttgctgagcctgcttatacctatatcctgacttttccttatgacaactggagaaatcatgagtctcgcattcagcgatctctcgggtttccaactggggacatactcgatgatccatctgtttttgacaagatgcctggtcccgagactccggaagagcagattgcgttcctggagaccagggggcctatacagtcatatcccctactactggcacgcacggcttatatggctgcatacaatgtgttcgcccagaagcaagggaaatctgatcctgctgctagcatatatgctcagtgcgagctgggtgagcggcggctgcacgttcatcttgtgatcggcggggatggactcaatagatatagcgctaaggcctggcgggctcagctgctgtacaagtggctagataacatccagcagcagctagagtataatgtcaagtatgggcacacgacggacaagccgttctgcgacgtgctcatccaggcctgctaccaggtcaagcagcgctgcgtcgatctgcgcgctgactactgcgagattctgcagtatcagagcaggaacggcgacaagtatgcctgcaggatagatcctagagagttcatctgtaactatctgctgccaaagaatctgaaatatctgacatgcatcgatcctgacaaggctactccgatggtctccttctttgcctgcactgagaaaacatatgcggccacattcattaatgggaagtgggtggacattcagcagagaaagtctatgctccagtctctgcgcgacactgtcgtcactcgcttcgagccaaagttttcgggcgacatattcactgatcttccaaaggtacctaaggccaactggcaagaatctaatcagccgtcgccttcttccaaaatgacaaagcgcgagatgcttatgctagattgcattgatcgctgtgaaaaggacaatctgctcacctatgaggacttggttgataactgttctgcgctgcttgtgatgctcgaatctcagccgggtggggggcggctgattgagaatctgctccagatggtgcacattaggatctgtcagaagcacactgcgctgagctacattcagctgcggtactctgacgagcctctgctggtagaaaacaaggcctatcagctgtttgccattcagggctacaacgcctggcaggccgggcactggctctgttgtgtactcaataagacggccggcaagcagaacacggttaatttctatgggccggccagcacgggtaaaaccaacatggccaaggcgatagtgcaagcggtgaagctctatggctgtgtcaatcaccagaataagaattttctatttaatgactgcgcgtccaagctagtctgctggtgggaggagtgcgtgatgaacagcgagtgggtagagcagtccaagtgcattctggggggaactgagtttaggatagacaggaagcacaaagactcgatgctgctacctcagacgccggtcatgatttctaccaacaacgacatttacactgttgtgggtggaaatacagtcaccggcgtccatagcaagcctctcagggagcgggtagtccagtttaactttatgaagcagctgccttctacctttggcgagattcctgcttcagacgtggtggctctgttgcttgagtgcataaagaaatttcctgatgttagtctggctggtttttgtgctcaatggaagcttgacaaggttccgaatgattttcctctggctaacatctgcgctggtcacacgcaggatctgatcctctacgagcacggacagtgcaccgcgtgcggtacctactatcctctggaggagcgcgatcgcggcgagtgggagctcggccggcctgaaccgcggagtccggagtttaaagtgccaggtaggacgcctacgttagctctactcctgacctctgactctgttgacgtgtacactaactctcggactttgtctacagtggtgccaccaaatactccggagaagcgtccggcgccagtggaggaggagcctcagccgtcgacttcgcgcgctgtaaagcgtcctcgcaaagagaaggtaactccaaaacctctctttgtggacgactggtgcgctcagccaccggatcgtctatttaagaaaaagtatgagcagttcgtcaagagcatcgcacaaccggcgccatcagagagcgatgactcggagccggagtcggagtcctctggactcacgccgtcggagtggggagagatgctcggggtcatcacgcagggattggaggaccaaccgctcgtccttcactgcttcgagaacctcgaggacagcgaagacgactccgcttgacgtgtttaacagacaccgagcagagactaaaactggactgcctctctgtgggttctattaccacagcactcgcctggcgagacggggcactgatatgatctttaacattactaaacctaaattccaagaaaaagctgtagacaataaggttacctgggatgttgtacgcgaattgttgtttgattttaaaaaatccatggatcaatcttatagaaatatgttatggcatatggctcggggcgggaaatgtgataaatgtgaatactgggatcaagtgtacatgcagcacctggctaatgtaacttcacccgatgtccatatgcaggacgtgtcggatgaggatatggtctctgctgccatggaggtagatggcacccacgaatagaaagcctggtggctgggtggtgcctggtttccgatacctgggtccatttaatcctttgaataacggggaacctgtaaatttcgttgacgccgctgccaaggcgcatgatcaagcctatcaagatattattgattctggtcaaaatccttactttagcttcaataaagctgacgctgattttcttgagactttgtctcacgactcttctgttggtagttggttggggcgctctgcgttccatttgaagaaggtactcgcgccacacttgcctcaggacggcggagataagccgggtccatcaggggcaaagaagccgcgcctcgatccaaaggccgatcgagcacagaaacgtaagctgtactttgctcgctctaaccggccagcaaagcaacaaaaaatgtctaacgctgcagaacccacagacgacgtggcgggaccttcggatcccgcggccgagggaagggcgggaggagccaatggaggtggtggaggcatgggaggaggtggaggacatggagtgggagtaagcacaggcgggtggcaggcgggaaccgtgtttaccgataacgccatcgtcaccacgggaaccagacagtggtacgcgcccatttacaatggtcatctctataaaaagctggcaccagacacaggcgtgtccagcaattggactggcatcagcactccttggggctactttaactttaatgagtatgacgcgcacttttcaccccaagactggcagcgtttacttaatgaatacaaacgctggcgtccaaaatccatgaaagttaagatatacaacctgcaaatcaagcaggttgtaacattgggcacagacacgctgtacaacaatgacctgactgcaggagtccacatattctgcgacggctcgcaccagtttccatattctcaacatccctgggataccggcgttatgcccgaacttccgaacaaagtctggaaactctcacaatacgcatactttcaggcactcggcgacctgacagacaccagaccgggaaccgggccagacgtaggcaatatcgaaaaacaccttatgaaagccgcgccattctacatcctagagagcgccagccatcaggtactaagaacaggggaggaaactagcttcaccttcaactttgaatgcgggtgggtcaacaacgatagggtctattgtccgcctcaagctgactttaacccgctggtgccaacaagacgctactttgccaccagggcagccagctcaacgccagccaacaacaagtttacctatcacagatacagtccatacaacaaacccagcatctggatgccagggccaagtttgggatacattggcagcacgcactcatcgcacggaccagaaaaagccaggggaccagtgacggtagtttatcaaccaccatacacaacagcagaaggagcgagcgccaatagggagcaagataaggaccagcagacactgctgccaacccttacagaaacctccatgcagaatgcaggatacgacgtagctcccgtcaacaacgcatccaacgacattggatacattaccatggcctacgactcccgagaggaaagcgaagacagcacgaccatcacagtaaaagacgtagacgcagactttgcgagatacgccgccgtgtttgtacaagacgggaccaaaaaagaaataaacgcagacggagcgctgtcaaccagagacagaaccaacttttcggaactaaagaacgtctggatgtacccgaaccaggcgtgggactcgacgcccatctcgagagacactccaatctgggtaaagtcgccaaggacggacagacataccatgttcgatacctcggacggaacgctgcccatggcacatccgcctggaaccatctttgtcaaagtagcaaaaattcccattccgggggaccaggactcatatctgaacctgtacgtcacgggacaagttacatgccaggtggtctgggaggcggaacggttccagaccaaaaactggagaccggaggtccggacagacgtgtccgtgttcacggacccgacgctatactcggtggacgcggcaggggtctacaacacgccagagtcattcaaggagggcatgcccacaaagcgcgggatcaatcgcgtactgtaaccttcaacccaatatcaataaacctcaacgtattgatataatctttatacagcaccagttgttgtatacgtcacaatatgttaattttatcatggc

SEQ ID NO: 223 - DNA, 5439 bp, California sea lion bocavirus 3
  source 1..5439: mol_type = genomic DNA; note = California sea lion bocavirus 3 / Bocaparvovirus pinniped 2 - NC_038536
gcgctgttaatgttcctgcggccaatgacgtatacaacaacatatgcatataaagattatatcaaaagcgaaagcattcatgtaatgagtaacctataaaggtcatagtccgtgttaatgaataaccagacagccaatcaggaaagagcacgcccatggtgtgatgggcggagaggggcgttactgggcggggaaatgagtatataagcacgcgcacatccgggttcaagtcattctgcttccgggatccgtcggagacagacctctctcggtgagtgatggcgattcctcttgctgctgtcaatgatcttatgcaatttcctgggccttgctatacctatgtgctcaaatttccatacgctgactggcgcttcaatgagatccgtctacaacgggcactgggatatccaactcatgacatcctggataatcccgacatctatgcgtctatgccgggtcagtctgagcctgctgaacaatctgcattccttgagaccagaggaccaatgcaggcatacaccctattactggcacgcactgcttatacggcggcatttagctttttctcggcgaagcaagggaaatgccctcctgctgctagtatttttactcaatgtgaacttggcgagcgagatcttcatgtacatgtagtgatgggtggagaaggcctgtcaagatacaacgccaaagccatccggtctcaattagccttcaagtggctagacgccattcagagtcagcttgaatacaatttgaagtacgggcacacggctgacaaggtcttttgtgatgttctgattgattgctgctaccgcgccaagcaaacatgtgtagacatgaaaacccaatactgtgatgtgcttcaatacaagagccgaagcggcgagatgtatgcctgccgagtagatgcgctagactacatctgtaactatcttctctgcaagaatctccgcttctttacacatgttgatccagaaaaggcgactccgtttgtcgcctactttccgtgcaccaataagacgtatgccgcatcatttgtgaatgggaagtggattccgattgagcttagaaaacaatggcttcagtatctcagagactctgtagttaaaaagcttgagccggtattctctggtgatatattcggagatcttccaaaggtacctaatgccaaatggcagactgattctgcttctccatcatcaagcaagccaacaaaaagagagactttaatgcttgattgtattgatcgctgtgaaaagaatcactatctcacatatgaagatcttgttgatggctgtcctgatcttgtaatcatgctagaatcacaacccggggggagtcgcttgattgagacattgattcagatggttcacataaagctatgtcaaaaatatactgctttgagctatattcgaatgagatatgagcctattgaattgattccatcaaacaaggcatatcagctactggcctttcagggatacaatccctttcaagcatttcactggctttgctgtgttttaaataaaacagccggcaaacaaaacacagttagtttctttgggccagctagcactggaaaaaccaacatggctaaatccatagttaacgctgccaagctatatggatgtgttaatcaccaaaacaagaattttgtgttcaatgattgtgcctctaaatttgtatgttggtgggaagagtgcttgatgcattctgactgggttgagcaggctaaatgtatccttggcggtactgaatttagaattgacagaaaacatagagattccatgctccttccacaaacgcctttaattatttctaccaacaatgacatttacacggttgttggtggaaatactgtatcccatgtacatgcaaagcctttaaaggaacgagttgttcagctcaactttatgaaacagctacaaccgacattcggggaaatcactcctgaagacgtgattgctcttctacaagcctgtatcgatcgctttcctgatttgactctggctggcttctgcgctcagtggaacctagagaaggttcccaatgattttcctctcgctaatctctgtcctggtcatgttcaggactttgttctgtatgagcacgggctgtgcactgcatgtggaggctactatccgctagaggagagagaccgtggtgacgtggaagctgctgtgacagcagaacctgcgcctgctgagttcaaagtaccaggtaagctattactcatatgggtgttgcctttccgcgttgtttctgctgacactgacactgattcatttattacagctactccgcctaacacgccaaccaagaggcgtcgggcagagtccactgacagtggaccttcaacttccacgcagtcttctcctgcgaaaaagcctcgcaagcaaaaggtgagaaccaagatcctctttgaggacgattggtctgctcagcctagtgatcgcctagacagaattcgctatgagcggttcgtcaaaagcatcacacgctcgccgcgagcagaggacgaggagtcggagccggagtcggagtcctccgagatgtcgccggcagaatggggggagatgctcggcctcatcacgcggggactggaggacgaaccgatcgtcctccactgcttcgagacgcttgaagggctcgaagacgacaccgatggaagtcttcaatcgccataaggcagagactggcatcaatctgtccatgtgtggcttctactggcacagcactagactggccagggccgggactgattggatctttaatgaggggaaaccattgtttcaatctaaatgtaccaataatcttgtatcttgggatattgtaagagaaatgttgtttcaattcaaaaaaacaatggatcaaaaatatagaaatatattgtatcatgggatgaggggggctgattgtgataaatgcaaatactgggataatgtgtacttggaacacttggctaacattgaaacaaatgatgttgttatgcaggacatttctgatgaagaaatgttgagtgctgccatggaggtagatggcacccacgaatagaaagcctggtggctgggtggtgcctggattcaaatacctgggaccgtttaatccattaaataacggggaacctgtaaattttgttgacgccgctgctaaggcgcatgatcaagcctatcaagatattattgattctggtcaaaatccttactttagcttcaataaagctgacgctgattttattgagactctgtctcacgactcttctgttggtagttggctgggccgctctgcgttccatctaaaaaaggtacttgctccacacttgcctcaggacggtggagaacagccggggccttcaggggcaaagaagccgcgccttgatccaaagcaggatcgagctcaaaagcggaagctttactttgctcgctccaacaaacaagccaagcaaccgagaatgtctgcaggcgcagaacctacagaagacgtggccggatctgcggatcccgcggccgagggaagggcgggaggagccaatggaggtggtggaggcatgggaggaggtggaggacatggagtgggagtaagcacgggcgggtggcaggcgggaactgtgtttactgatagtgccattatcaccacgggaacacgtcagtggtacgcgcccatttacaatggtcatttgtacaaactgctgaaaccagattctggccttcatagcaattggactggtatcagcacaccatggggatatttcaatttcaatgagtatgacgcgcacttttctccacaagactggcagcgtttgctgaacgaatataaacgctggcgtccaaagtccatgcatgtgaagatctacaacttgcaaattaagcaagtggtcacattgggtgcggacacgttgtataataatgatttgactgctggtgtgcatatattctgtgatgggtcgcatcagttcccatattctcaacatccatgggatactggtgttatgcctgaacttccaaataaggtatggaagctatcacagtatgcctatttccaggcgctaaatgatcttatagatacaaacgcaggcagcaacgcagatgttggaaacattgaaaaacatataatgaaagctgcgccgttttacattctggaaagcgctagtcatcaagtacttcgaaccggagaagaaaccagttttacatttgaatttgactgtgggtgggttaccaatgatagagtgtattgtccaccacaggcagattttaatcctttagtaaacacgcgccgatattttcccacaagacaaactggagcgggcgccgcaaacaaatttacataccatagatacaatccatataacaaaccgagcatctggatgcctggtcctagcttgggatacattggagccactcaaacatctgcaaatccagaaaaagcacgaggacctgtcactgttgtctatcagccaccgtatacaactgcagacggagccagcgcaaacactgaacaaaacaaggaccagcaaacactgctaccaaaattgactgaagcgtctatgcaaaatgctggatttgacgtggcgcctgttaacaacgcatgcaatgatcttggatacatcactatggcatacgattccagggaagaaagtgagcaaagtacaacaatcacagtcaaagacgtggacgcggattttgctagatatggggctgtgtttgtacaagacggaacaaacaaggaaatcaaagcagacggaactgcgctcactacacaagacagaaaaaacttttcagaacttagaaatgtatggatgtatccaaatcaggcatgggacgcaactcccatatcgagagatactccgatatgggtaaagtcgccaagaacagataggcacaccatgtttgatacctcagacggaacgattccaatggcacatccaccggggaccatttttgtaaaggtggcaaaaataccaatcccaggcgrccaagactcatatctgaatctatatgtgacaggacaggtcacttgccaagtcatctgggaggcagaaagattccagaccaaaaactggagaccagaagtacgaaccgacgtgtcggcgttttcagaccccacattatacactgtcaatgcggcgggggtatacaatacaccagaaacattcaaggaggggatgccaacaaagcgcgggatcaatcgtgtactgtaacatggatgtatgtatatacaagaacgagacaataaagctttacattttgatatatctttatacagcacctgttgttcacgtcatcatatgttaattttatcatggcgcggcttctttgcccctgaaggccccggctgttctccaccgtcctgaggcaaagaagccgcgccttgatccaaagcaggatcgagctcaaaagcggaagctttacttgctcgctccaacaaacaagccaagccaac

SEQ ID NO: 224 - DNA, 5413 bp, Canine bocavirus 1
  source 1..5413: mol_type = genomic DNA; note = Canine bocavirus 1 / Bocaparvovirus carnivoran 2 - NC_020499
tacaccgagcggcttcgccgctgcgccctgcgggcgcgctgtatatgttcctcggcgaacgtgacgtaatgtagtagtggtgtctataaagattatatcaattgcgctgtcttgtggttggttaatgagtgactcgctgtgtcagctgtttgcgattggctgttgttttatggccttgttatgttattggttactgattgatgaattttgggcgggccgagtgactatatatataagtgtgcttcctgcttcgtgtcattctgcttccggctttcgtcgcgttgagatctctctgagggtgagtgatggctcttgctctggccggggtcgacgatattattcactttgctcgtcctgcctatacctatgttctcaagtttccttacgctgagtggcggcgggatgaggctcgtcttcagagcgctctggggtacccgcatcatgatttactcaaggactcgactccgttccttactatgccggggcaagattctccggccgagcaggcttcctttctggagtctaagggtcctcagtacggatatgccttattactggcacgcacggctcacgctgctgcatattctatattctcgcagaagcagggcaaatatcctcctgctgctagcatatatgttcagtgcgagcttggccttaagtatcttcacgtacacgtcgtgatgggcggtgacggcttgaaccggtacaacgccaaggccacttgctctaacctggcctataagtggctggacaacattcagtctcagctcgagattaacgtcaagaccggtcacaacaccgaccttgacatgtgcaattctctcatcggctgcgtctaccaggccaagagagagtgctttgacatgaggaccgagatttgtaccatcctgcagtacaagtgccggaacggcgagatgtacgcctgccgggtcgatcctatagagtttatctgtaactacctgttgtgcaaaaacttgaaattctttactatggtcgaccctgacagagcaactccgtttgtctctcactttgcctgttctggtaaaacgtacgcggctacatttgtcaatgggaagtgggtcttgcctcaggttaggaagcagtggctaaattatcttcgagactctgtctgtcagaaggccgatccagtcttttccggcgacatgtttgaaaacttacccaaggtacctcgcgcgacctggtcggtcgaagtttcctccaataaatctaaaatcactaaaaaggaaactctgatgattgactgtatcgatcgctgcgaaaagaatcacttgcttacctatgaagatttggtcaatgagtgttctgatcttgtaatcatgctcggctcacagccgggcggaactaaattgattgagaccttgcttcagatggttcacattaagatttgtcagaaatatacggccttgtcttatgtcttgtcgcggtactcggcgattgagctgctgcctgagaacaaggctatacagctcttgatctttcagggatacaatccctggcaggtcggccactggctgtgctgcgtgctgcacaagacggccggtaaacagaataccgtgtgctttttcggtccggccagcaccggcaagaccaactttgccaaggctatagtgaatgccgttaagctgtacggatgtgtgaaccatcagaataagaattttgtgtttaacgactgcgcgtccaagctggtcaattggtgggaagagtgcctcatgcacaatgattgggtagagcaggccaagtgcctgctgggaggaacggagtttagaatcgaccgtaagcataaagactctcagctgctgccgcagactcctgttgtgatcagtaccaatcacgacgtgtacaccgtggtcggtggaaacaccactactatggttcacgctaagccgcttcgggaaaggatcgttcagtttaatttcatgaaacagctgtcttccacctttggggagattgatcctatggatgtggtggctctgttgcaagcctgctcttctcgattcgatgcgtcgctcgactcgttttatgctcagtggcagcttcagtgcactcctaacgattttcctctcgcttcgttctgtgacgggcattcgcaggactttgtccttcacgaggtcggcttctgcgacacgtgcggtggctacgctcctctggagactacggaccgcagtcagccgctgccggctcgacctgcttcgtccggtgagtctttgatttttgcctgtacgctgccttgactgttttattttctgtatgctatactcagctttgtgctcttttttcagcgtcgggtgtgaagcgtcgcctggactttgacccggatcctgctccttccacgtcgacggctcctccggcgaagcgccactccaaggtgaggcgtcccgtgttccacgacgactggtgtagtcagccggtagatcgcctagaccgcatccgctatgaaaagttcgtcgagagcgtcgtcggcgcgtcagacgagtcaccatcggagccggagtcggagtccacgggactcacgccttcagagtggggagagatgctcggagtcgtctgcaagtcgctggaggaggaaccgatcgtcttacactgcttcgaagacatcacctctctctcggaaaccgaagacgactccgatggaggtcttcaatcaacaccgcgccaagacaaagactgacatttcaatgtgtggcttttactggcacagtactcgcctcgcgcggtcgggtaccgactggatctttaacagtggaaagcctctgtttcaatctaaatgttctaataatcttgtatcttgggatgtggttcgtgagattctgtttgaatttaaaaaaactatagatcagaaatatagaaatatgctgtggcactttggtcggggtgggtactgcaataaatgtgaatactgggataatgtgtaccttgaacacctagctaatgtagattcctctaatgatgttgttatgcaggagataagtgacgctgagatgttggaggctgccatggagattgatggcgccagcgaatagaaagcccggtggttgggtcgtgcctggctatagatatttgggtccctttaaccctgctgacaacggggaacctgtaaattctgctgacgaggccgctcggtctcatgatctcgcctatcagtcctatctcgatgctggtgtaaacccgtactttagctacaataaagctgattctgatttcattgagtcattggctcacgactcttcattcggcggctggctggggcgctcggcctttggcctcaagaaattgcttgcgccgcatctcgcggatacaaagggcaatcctgacgctccgtccacctcgcggggaggttcctctgtatccaagtcagagagagcacaaaagagaaaactctattttgccagatcaaacaaacaggccaaacaacaaaagatgtcagctccagaagctccgaccgaagatgtggcagaaccgggtccatctggctccgatccgcgggcgggaggaaatggaggtggtggaggcatgggaggaggtggaggacatggagtgggagtgagcaccggcggatggaaggccgggaccgtgtttgggaatgactttgtcatcaccacaaacaccagacagtggttcgctcccatctttaacggccacgagtacaaacgcatggcgccgaacgagaacagcgaaccggccaccaacagacactgggtgggaatcagtactccgtggggatactttaactttaacgagtacagttcacatttctcaccacaagactggcagcgcctcaccaacgaatataaaagatggagacccaaggccatgagggtcaaagtatacaacctgcaaataaaacaggtggtcactctggggtcagacactttatacaacaatgacctgacggccggcgttcacatcttttgtgacgggagccatcagtttccgtactctcagcatccgtgggacaccgggaccatgcccgagctgcctcatcgcatctggaggatctcgcagtacgggtactttcagctacaggctgacctgacgaacgggggcgtatcatccgagacgcccgacgtcgggaaccaagaaaagcagctgctaaagagtgcgccgctatacatgctcgagacggcgtcgcaccaagtgttgaggacgggggaggaatccagcttctctttctcgtttgacagcgggtgggttatcaacgacaaggcatacgccattccacaggcagattttaaccctctgattcacaccagacgatactttcctacacgaaacaataacaccacatcaacaggggggctcatgttttaccatagatataatccatacaacaaaccgagcaactggatgccggggccgagcttgggctacctgggggcgacacagacatcaaccaatccacagtacgcgcgtggtccggttactgttgtcacgcagccgccgggaacgacggcagatagcgccaatatagacgagcaatcaaccacacacgtcccgtcaaaggcgaccatgcaaaattcagggtacgacgtgaaccctgtcaactgcggtagcagcagattagacgcgcactcgcttgcatatgattcagggccagagagtcgaggacagaacatcattaccgtaagggggatagacttagacatggccttgggtctccatcaaatggtgcaggacggaacagaaacagaagttggtacccaaactcccagaactaattttactgaactcaaaaacgtatggatgtacccaaatcaggcgtgggacaccactccggtatccagggacactcctatttgggtcaagattccaaaaacagacaggcacaccatgcaagacacctcggacggaacgctgccgatggcgcatccgccgggaaccatctttgtcagggtcgcaaaggtgcccattccgggggagtcagactcttacctaaacctatacgtgacaggacagataacgtgtgaaatactctgggaaacagagaggttccagaccaaaaattggagaccggaaatcaaaaacgatccatccgtattcagcgaccctttactatacactttcgacagacagggggtctacaatacaccggaaacattcatagagggcatgcccacaaaacggggaataaacagggtcctgtaactttaagaacaaataaagccataaaacgaaaagttttgcgcatttgttatttctttaaaaggaccatcagtactgtacgtcactatagatcatctgatacggtcaggtattgcttaattatatggcgcagcttagttatatatcaggtatatgctcgtcacataactaagctaccatataattaagcaatacctgacgtatcagatgatctatagtgacgtacagtactgatggtccttttaaagaatac

SEQ ID NO: 225 - DNA, 5097 bp, Canine minute virus
  source 1..5097: mol_type = genomic DNA; note = Canine minute virus / Bocaparvovirus carnivoran 1 - NC_004442
ctccatataaagacaatatcaaaatggaggacggaagtgtgattctgcttactcatagttatataacacacttatgaatatgctaatacagagattagaatatccaatcatattgaaacacaagtactgcagtagtagatgtggctgcttctgattggatgttaagagtatataaggataggtatttcctgcttctgttcatttcgcttccggacttcgtcgagagaacatctctgacttctaaccgtgagtgatgtcgacgcttccaatcgcgtctttagacgaccttactcaatttttctactcctgcttatacttatatcctgaaatttccatatgtggggtggaaggctgatgaagttcgtctgcaaagagcactgggcggtattcggggagacgctctcgatgatccatccgtgtacatcgggatgcctggtcccgatagtccggttgagcagacgagttttctcgagacacatggacctgattccagttatcatcttaacctgtcgcattgtgcacatatggctgcctatagcgtattctccgttaaacagggaagagcacctccggtggctagcatttttgtccagagcgagattggcgaacgcgatttgcaccttcatttggtccttggaggacaggggctaaataaatatagcgctaaagcgttccgccatcagctacagtacaaattctgtgaaaatctaatcaccgttctagagaaacatgtaaacgaaggaactacttctgatcctgaaatgtgttcagttcttataaaatgtctatccaaagctaaaaacgaagaacatgcatattgtactattttacaatataaaagcagaagtggggacctctatgcatgcagagtagatccagtagaatttatctgcaactatctacttcgaaaaaaccttaaatactacacctgtatggatccagataaagccacacaacatattgcctattttgatgccacaagtaagacttacgctgtaaccttagctaatggaaaatgggttccaacagactgtagaaagcaatggctaaatatacttcgccacaacgtgatccaaaaaaacgagccaatatttgccggagaaatgtttgatgttttgcctaaggtacctgaatcttcttggaaaattgatatgctttcttctcaatctaaaataactaagagagagactttaatgattgactgtatgaatcgatgtgagcaaaattactggttaacatatgaagaccttgtaaatgggtgcgccgatctcgttgttatgttagaatgtcaatcgggcggaaacaaacttatagaacagatacttagtatggttcatataaagatgacgcaaaaatatactgcgcttagttatattttagcaaaatatgatccaatcccatttacgactgacaataaagtgtggaaattattaactttacagggatataatccttggcaatttggacactggttattatgtgtcctagataaaaaggcgggaaagcagaacacaataaacttttatggtcctgcaagtaccgggaaaaccaatttagccaaagccattgtaaacgctgttcagttatatggatgtgtaaatcaccaaaataagaactttgttttcaatgattgtactgcaaaattaatatgttggtgggaagaatgtatcatgactactgattgggtggaacaagcaaaatgtataatggggggcacacaatttagaatagacagaaaacataaggattcacatctattaccgcaaacaccgttaataatatcaaccaatcataatatatatgaagtcacaggaggcaataccactacacatgttcattctatgccacttcgggagagagttgttcaatttaactttatgaaacaacttgaaagcacgttcggtgaaatagagccaacagacgttgttgcattattacaagtatgttacaaaaaatattcagtttcattgtcagactttcatcgtacttggaacattaaaaaaactccaaatgactttccattgacggttgtctgttcaaatcatacacaggatctaattgttttcgagagtggtctatgcggatcgtgcggaggctattatccactagagacgtggaatgaaaataactgccaaaatatagaagaagaagacataacaggtgagatccttaatcacaatgatatatcctatgaagaattcgaggaatggatcactaacttcgatttttcgctcttagactctccagaaacaccaaacgctaccactccatcaagaaaacgaacaagttcggacgaaaccataaattcgcctccaaaaaaacaacgcaaaacagaacacaaggtactgatcgattggtcctcacaaccatctacttcggccgagcaatatgtctacgagacatatgagcaagagatcaaaagcgaggagccggagtcgcagtccacaggactcacgccgtccgaatggggagagagacttgggatcattccacaggggatggaccaggaaccaatcgtcctccactgtttcgagacaatcgactgggaggaagacaacaccgatgcatgtattcaatgaacataaaagcagaagcaaagaacctcttcctgcgttctgtggcttctactggcacagcactagattagctcggtgtgggactgactggatttttaatgagggaaaacccaaattccaatcagtatgtcatgaaaacaaaataacatgggatcaatgtagagaaatgttatttgaatttaagaaaacaatagatcaaaaatatagaaatattatgtatcatatgggacgaggggggttctgtcaaaaatgttgttactgggatgatgtgtacaccaagcatttggctaatgttaacgatgttctcacacaggatctgtctgacgcagaaatgctttcagctgcaatggaggtagatggctcctccgaatagaaaaccaggtggttgggtcgttcctggatataaatatcttggaccattcaatccactagataatggcactccaataaacaaagttgacaaagcagctcaaaaacacgattttgcatatcaatcgtatattaataaaggtgaaaatccatatttaaacttcaataaagctgattctgattttattgaggatctcaaaaacgattcatcctttgccgggtggctaggcaagtctgcatttagacttaaacgtattttggctccacatctaaaagaaaacactcctcctgctaaaagagtggccggaaacagtagacaagatagggcgcaaaagaggaaactctattttgcgcgttctaacaaaaactctaaacaagctaggatggaaccgcaggaaactgagaacactattgaggctgatgcgggcattgcggggcgtgctgggggtggtggtggacctggtggaggtggatcgggcggtggctccggggtcggagttagtaccggtgggtgggaaggaggaacgctgttcggagataatagagtcatcacagttaacacacgacagtggtatgcacctatatacaacggacatagatacaccaagcttgagggaaccggaaacacattctggaaagggataaaaactccatggggatactttaattttaacgcgtacgactcgcacttttcaccacaagactggcaacgtctcacaaatgagtacagaagatggagaccaaaaaaaatgatggtaaaaatatataacttacaaataaaacaggtagttacactgcagggggacactttatataataatgatcttacagcaggagtacacattttttgtgacggaagtcatcaatatccatattcccagcatccgtgggatgctggaacgatgccagaacttccctataaagtctggttgctggaaaactatggttacttccaattccaaggtgacctaatagacacgagcgtggacggtggttctccagacgttgaaaatgtagaaaaggarattgcgaaatctgctcctttctacattctcgaaaatgcaaaccatgaggtgttacgtactggggaggaaacaaacttccattttaactttgattgtgggtgggtcaataatgaccgggcatactgcccactacaggcggactttaatccactggttaaaaccagacgctacttcgctacacgaaacaactacaacaactcaggaaaattcgtgtacacgcgatacagtccgtataacaagccatcacagtggatgccaggaccatcgcttggatacattggaaacacacaaagcgcggctactcgggaacaagccctcggaccagtaactgtagtgactgctccacctgggacatcagcttacactgccttcactgaacaacaatcaaaaaccaatcagcagtctgcatctaatgcaacgtggtccggttatgatgtcagtccagtaaactgcgcacgctctggattcgataagataggattagcctatgactctgctccggaaagtgagttggaggagaaaatatctattagagacatcgacaacgacatgagccgatggggtcaagtgttcgtgcaagacggaacaaacaaggaaatatcaaacgataacactggtcaagggggaaacacacgacaaaacatggcagagttaaaaaatgtatggatgttccccaatcaagcatgggattcgacgcccatcagcagggacttcccgatttgggtaaaatcaccaaacacggacaaacatacactattcgatagctcggatggaactctgcctatgtcgcatccgccgggaactatatttgttaaagttgctaaaataccaataccaactcagacaaatacagattcatatttaactctgtatgttaccggtcaggtcacatgcacaatagaatgggaggtcgagcgatttatgaccaagaactggagacccgagtcaaagaacgacgtatcatctttcagagacgccttcctatacacagtgggagcagacggaacttataatacaccagaaaggttcctggaaggaatgccaacaagaagaggcataaacaaaacgctgtaattgatataatctttaccatgtagtagtataccgtcaccactgggtgtgtttta

SEQ ID NO: 226 - DNA, 5323 bp, Canine parvovirus
  source 1..5323: mol_type = genomic DNA; note = Canine parvovirus / Protoparvovirus carnivoran 1 - NC_001539
attctttagaaccaactgaccaagttcacgtacgtatgacgtgatgacccgctgcgcgcgctgcctacggcagtcacacgtcatacgtacgctccttggtcagttggttctaaagaatgataggcggtttgtgtgtttaaacttgggcgggaaaaggtggcgggctaattgtgggcgtggttaaaggtataaaagacaaaccatagaccgttactgacattcgcttcttgtctttgacagagtgaacctctcttactctgactaaccaaccatgtctggcaaccagtatactgaggaagttatggagggagtaaattggttaaagaaacatgcagaaaatgaagcattttcgtttgtttttaaatgtgacaacgtccaactaaatggaaaggatgttcgctggaacaactataccaaaccaattcaaaatgaagaactaacatctttaattagaggagcacaaacagcaatggatcaaaccgaagaagaagaaatggactgggaatcggaagttgatagtctcgccaaaaagcaagtacaaacttttgatgcattaattaaaaaatgtctttttgaagtctttgtttctaaaaatatagaaccaaatgaatgtgtttggtttattcaacatgaatggggaaaagatcaaggctggcattgtcatgttttacttcatagtaagaacttacaacaagcaactggtaaatggctacgcagacaaatgaatatgtattggagtagatggttggtgactctttgttcggtaaacttaacaccaactgaaaagattaagctcagagaaattgcagaagatagtgaatgggtgactatattaacatacagacataagcaaacaaaaaaagactatgttaaaatggttcattttggaaatatgatagcatattactttttaacaaagaaaaaaattgtccacatgacaaaagaaagtggctattttttaagtactgattctggttggaaatttaactttatgaagtatcaagacagacaaattgtcagcacactttacactgaacaaatgaaaccagaaaccgttgaaaccacagtgacgacagcacaggaaacaaagcgcgggagaattcaaactaaaaaggaagtgtcaatcaaatgtactttgcgggacttggttagtaaaagagtaacatcacctgaagactggatgatgttacaaccagatagttatattgaaatgatggcacaaccaggaggtgaaaatcttttaaaaaatacacttgaaatttgtactttgactttagcaagaacaaaaacagcatttgaattaatacttgaaaaagcagataatactaaactaactaactttgatcttgcaaattctagaacatgtcaaatttttagaatgcacggatggaattggattaaagtttgtcacgctatagcatgtgttttaaatagacaaggtggtaaaagaaatacagttctttttcatggaccagcaagtacaggaaaatctatcattgctcaagccatagcacaagctgtgggtaatgttggttgttataatgcagcaaatgtaaattttccatttaatgactgtaccaataaaaatttaatttggattgaagaagctggtaactttggtcaacaagttaatcaatttaaagcaatttgttctggacaaacaattagaattgatcaaaaaggtaaaggaagtaagcaaattgaaccaactccagtaattatgacaactaatgaaaatataacaattgtgagaattggatgtgaagaaagacctgaacatacacaaccaataagagacagaatgttgaacattaagttagtatgtaagcttccaggagactttggtttggttgataaagaagaatggcctttaatatgtgcatggttagttaaacatggttatgaatcaaccatggctaactatacacatcattggggaaaagtaccagaatgggatgaaaactgggcggagcctaaaatacaagaaggtataaattcaccaggttgcaaagacttagagacacaagcggcaagcaatcctcagagtcaagaccaagttctaactcctctgactccggacgtagtggaccttgcactggaaccgtggagtactccagatacgcctattgcagaaactgcaaatcaacaatcaaaccaacttggcgttactcacaaagacgtgcaagcgagtccgacgtggtccgaaatagaggcagacctgagagccatctttacttctgaacaattggaagaagattttcgagacgacttggattaaggtacgatggcacctccggcaaagagagccaggagaggtaagggtgtgttagtaaagtggggggaggggaaagatttaataacttaactaagtatgtgtttttttataggacttgtgcctccaggttataaatatcttgggcctgggaacagtcttgaccaaggagaaccaactaacccttctgacgccgctgcaaaagaacacgacgaagcttacgctgcttatcttcgctctggtaaaaacccatacttatatttctcgccagcagatcaacgctttatagatcaaactaaggacgctaaagattggggggggaaaataggacattatttttttagagctaaaaaggcaattgctccagtattaactgatacaccagatcatccatcaacatcaagaccaacaaaaccaactaaaagaagtaaaccaccacctcatattttcatcaatcttgcaaaaaaaaaaaaagccggtgcaggacaagtaaaaagagacaatcttgcaccaatgagtgatggagcagttcaaccagacggtggtcaacctgctgtcagaaatgaaagagctacaggatctgggaacgggtctggaggcgggggtggtggtggttctgggggtgtggggatttctacgggtactttcaataatcagacggaatttaaatttttggaaaacggatgggtggaaatcacagcaaactcaagcagacttgtacatttaaatatgccagaaagtgaaaattatagaagagtggttgtaaataatatggataaaactgcagttaacggaaacatggctttagatgatattcatgcacaaattgtaacaccttggtcattggttgatgcaaatgcttggggagtttggtttaatccaggagattggcaactaattgttaatactatgagtgagttgcatttagttagttttgaacaagaaatttttaatgttgttttaaagactgtttcagaatctgctactcagccaccaactaaagtttataataatgatttaactgcatcattgatggttgcattagatagtaataatactatgccatttactccagcagctatgagatctgagacattgggtttttatccatggaaaccaaccataccaactccatggagatattattttcaatgggatagaacattaataccatctcatactggaactagtggcacaccaacaaatatataccatggtacagatccagatgatgttcaattttatactattgaaaattctgtgccagtacacttactaagaacaggtgatgaatttgctacaggaacatttttttttgattgtaaaccatgtagactaacacatacatggcaaacaaatagagcattgggcttaccaccatttctaaattctttgcctcaatctgaaggagctactaactttggtgatataggagttcaacaagataaaagacgtggtgtaactcaaatgggaaatacaaactatattactgaagctactattatgagaccagctgaggttggttatagtgcaccatattattcttttgaggcgtctacacaagggccatttaaaacacctattgcagcaggacgggggggagcgcaaacatatgaaaatcaagcagcagatggtgatccaagatatgcatttggtagacaacatggtcaaaaaactaccacaacaggagaaacacctgagagatttacatatatagcacatcaagatacaggaagatatccagaaggagattggattcaaaatattaactttaaccttcctgtaacgaatgataatgtattgctaccaacagatccaattggaggtaaaacaggaattaactatactaatatatttaatacttatggtcctttaactgcattaaataatgtaccaccagtttatccaaatggtcaaatttgggataaagaatttgatactgacttaaaaccaagacttcatgtaaatgcaccatttgtttgtcaaaataattgtcctggtcaattatttgtaaaagttgcgcctaatttaacaaatgaatatgatcctgatgcatctgctaatatgtcaagaattgtaacttactcagatttttggtggaaaggtaaattagtatttaaagctaaactaagagcctctcatacttggaatccaattcaacaaatgagtattaatgtagataaccaatttaactatgtaccaagtaatattggaggtatgaaaattgtatatgaaaaatctcaactagcacctagaaaattatattaacatacttactatggtttttatgtttattacatatcaactagcacctagaaaaattatattaatatacttactatggtttttatgtttattacatattattttaagattaattaaatacagcatagaaatattgtacttgtatttgatataggatttagaagtttgttagatggtatacaataactgtaagaaatagaagaacatttagatcatagttagtaggtttgttagatggtatacaataactgtaagaaatagaagaacatttagatcatagttagtaggtttgttatatggtatacaataactgtaagaaatagaagaacatttagatcatagttagtagtttgttttataaaatgtattgtaaaccattaatgtatgttgttatggtgtgggtggttggttggtttgcccttagaatatgttaaggaccaaaaaaatcaataaaagacatttaaaactaaatggcctcgtatactgtctataaggtgaactaaccttaccataagtatcaatcgttgcgccctaatttaacaaatgaatatgatcctgatgcatctgctaatatgtcaagaattgtaacttactcagatttttggtggaaaggtaaattagtatttaaagctaaactaagagcctctcatacttggaatccaattcaacaaatgagtattaatgtagataaccaatttaactatgtaccaagtaatattggaggtatgaaaattgtatatgaaaaatctcaactagcacctagaaaattatattaacatctctaga

SEQ ID NO: 227 - DNA, 5257 bp, Chicken parvovirus ABU-P1
  source 1..5257: mol_type = genomic DNA; note = Chicken parvovirus ABU-P1 / Aveparvovirus galliform 1 - NC_024452
gagtcttgctttctctagtcaacctacttccatcctccatggaagtattattaagtgtagtttttataccttatcgctaggggaatccctggcgcttgcgaacagcgggcttcgcccgcgcccgaagggcgtcttagaaggcgtgactatgcatatgagggataacatggaagttggtggttggttgtagagagaaagcaagactcataacgggtggtatgacctatcaatgattgactagctgagtcatgctgacttcggattcgctgggtatataaggcggtgtctggagcggccaatcacccatccaccttaagtggttccgggtcactctcagagcgctcatttgccctttgacaggcgaacaatccgcacgttgattcggctgccagtgctgctgagctggtaagatggcattcccaacacgcggtgggttttccgctattctaaatcttcccagcgatttaatcgtgggacagaaaaatatgcctgtattcgagtgtgtaactgccggttacacttctccggattcaggcgaattcgtggcttctagatttccacccaaccacgaattgagacaagaaattagaaattttatcgggaacccagaatgggacgatccagatttgacatggatagatttccacattcaattggcgaaacacgccatagacgtggaaactaaactcaatccaaatttacaaattttctggcaaatggaaaaatctagtcagtcgggaagatatcatctccatttactgttcgtagaaggatgtacttccaggcaaattacatggatagtcaaaagaatgagaagggaactttgcaacaaagctgcagaaatgttgcacatgttttgtcctgatttccccaaaagtcaaatttggggatcgctggtgaatatccaaaacgctatgctttcactgaatagaggatactcaccgagaattgggaaaccaatcccccaaccagtgaatccatactcatttctaaaatactacatgttcaattctgctaaaatgagctttctgagaggggctactccaaaattagctgaaaaattaccaattggtacaagatatgctagatttgaagggtctcctgacctggacgagggtcccgaaattccatcgcaggaattaactccaggggacactctacctgtatgctatgtaagtactgaaactggttgggggaacggtgggggggagaccgtgatcaaaaccagtatcattgaaaaattatgcatggaagcattaagattatgcagagaaaatcacatttttaccatgaaagcatttaagctaaaattcccagacaaattcatgcagttcagttcgcgaaatcaggggttagtgaaattagaagaaacaataaacctgtattgtgagaccattatcaacgagcacgatgcgtgggaaatagctaaatcaatacatggagatgttgacacagctgatctagatgataatttagccatccggttatgcagctaccaaggatatagtccaaagtacgttgctagactgatattgtgctggctatccggacaagcagggaaaaaaaacgcattatatttccacggaccagccaatactggtaaaacaatgatggcagaaagcatatgcaaaatggtacaaatatacggtaacgtaaatcataacaacaaaaacttcccactcaacgactgtcacaacaaagcagtactttggtgggaagaatgtagcatgacggaagaacacgtagaatctgcaaaatgtatcatggggggatcctcagtgagaatagataaaaaaaatcaagattcagttctactatgtaaaactccaatcgttattacttctaataacgatatcactcaagtttcaagcaggaatgccatctcaacagttcatgcagctgcaataagagcaagatgcttaaaatttacatttaacaattggctaacttcaaattggggactgataaccgttgatcaaatgtatcaatttttatgctggggagaattagagggcattccgaccgtggatagtctcctgaaagatcatcccgaatttaacgggactttgccttataaccaacccaaaggtaaattttgtgccgattgtgttaaccagttcagcactgcaactaacctgaccgtgtgcccagcctgctccggatggacaagaaagccattctccgaagaagaggaacccccctatactggttctgaatccgggctctttgagaaagccaacgaaggtaagaatgaggtcccagggatttatcccgtaaatagtggatccaggttaatccctgaggccccaatcttacagaaaccatcgacctattgggagacggagatccccagcgaatcgagtggatttccagacgagccagacttcaccgcaagcgcaaaacttctcctgaaagtggacgatctccacctagaaagcgatctgaaagtggagcaggatcctctggagtgcaaaaagtgctgtctggttcaataggccaactcgaaggtaaaagcataacatttactgatgatctaccttcccttactgagttattttgcgacgaaacgctgcccccatccccgacatccccaatcaatctccctgaaccctctcgagtggtacaatggggggacttcaaagctcaatgggtggaaggatacattggaaagtggagggttgcattttctaatttcatgtgttggtataatgctaatattacacagattcagacagtagaaggtgatccttgtactaatcctgatgtttttcacgagttatatttccctatcaagcaacacgccatggacgcacgcatgctgaaaatgaaaatcgaagacaaaatacaaaagggcgacttcacacaagacatacacctagacatgacattaacacaatgcattcaaacagcacttagcgacgacccagcagggatatggccatgtgtagacaggttagctaattactgcaatgttatattggcttctataggcacacaatgaaatacaaagctccgaaaggctacgtcccttcactgcccaccactgatgaagaagcatatcaccacactagatggtggctggatcatgttgaaaattatggaaaaaataaagctattggtagaggcaaaggaaaagctaggaaagagctcacaccacaacaaaaagctgaacgcaaacgcttttttatcacgcaggcacaaaaaaataaaaaacctaattacggcatcccatcttcatcgcagcacaaagagtttttcaaaaatcatcagggggcgcaagggggaaaagcaaagcaaaaaaccaaacatatagaaaatcaagcaccacaaaggcaagaggacccagaggaagggcccgcacctaaacaacctagagtagaagaaaacccatataatcaagaagaattagaagaaatgatggcagatgaaaatgaacctgatcaatctgggatccctatggaattaagcgacgggcctgggactgtgggaggaggtggtggtgggggaatcgggcattctaccggtaattggaattgtgatactatatgggctgaaaatacatgtaaaacctatgcaagccgccattgtgtctgtcttatgcgtgacatggatcaatataaagcaattggcaacgctaacgggcaacacgggttagacactgaaaaccaaacacaatactttggtttctctacaccatggaattatattgactttaatcaatacagcgtgcactttagtccacgagattggcaacaactagttaataattattcgagatggcgcccacgcgccgtacacgtgaaaatctttaacctgcaagtcatccagaaaaccgtaacagatagcggtacccagtactctaacgacttgacaggaacaatccaaatatttgcagatcaggaaggcagatatcctagattgttataccctaaccaaacaactctaatgggtccatttccatccaatatatactatctgcctcaatacgcatacatgacaagcatgtttaattcgggtggaccaacagtatcatcgtggtggggatttccaacacgcgaaagcgcattttactgtctagacgaaagcccctcgcaaatgttaaggaccggtaatgagtgggaaaccacatttatctttccatcgagtacacaatggtgtagcaataaaatatcaaccgtgtccattacacaaagacaaaacccattatacgatacatggaacgtcaatggcagaggcgatgatgctaaaagaggcaatttctgtacttggagaagcccatggtatccagggccttacatttacctaaccgatacatccgcagcatcacagcgtttagaaaatcttgctaacgttgccgtaggcccagacggcatgcctctagcaccaggaatgccacaatacagatcagaatccgataaagacgaatatctacatacattttgggtacctaaaaaagttaagatgaacgaaggagatatacgtaacgcgcaaatagatgtatccactgcaaccaaagtacaagtagatacatcgacactatacaatacatgtcctagatcaggatacatgtccactgtttcacagggaggggcacccgcacctattgtctggtcagggtgtgtacctggcatgatatgggacaataggccggccacctactttgatccgatatggcaacaattcccagaaacagacgaacaattcaaaattatctctcaattggggggtatacctgttaaagaatcacctggtcacatttttgtcaaagtcacgcctaagccaaccggggctgcaaatggtttgatcgatgaatattgtacttttacgtgtactgtcgaaatagaatgggaattagaaccactcaacactcacagatggaacatgagaagtatgatttcgtacgagaccaccgatgccaaagctggaagacaaattgtcgatgaaaatggtcaataccaggtcaatgttaactcggctgacattactcgtctgtatatgaccaagcgcgcgccgcggaccaactaatgtaactttcaaaaaatttcaataaagagtcttgctttctctagtcaacctacttccatcctccatggaagtattattaagtgtagtttttataccttatcgctaggggaatccctggcgcttgcgaacagcgggcttcgcccgcgcccgaagggcgtcttagaaggcgtgactatgcatatgagggataacatggaagttggtggttggttgtagagagaaagcaagactc

SEQ ID NO: 228 - DNA, 4615 bp, Turkey parvovirus 1078
  source 1..4615: mol_type = genomic DNA; note = Turkey parvovirus 1078 / Aveparvovirus galliform 1 - NC_024454
atggcattcccaacacgcggtgggttttccgctattctaaatcttcccagcgatttaatcgtgggacagaaaaatatgcctgtattcgagtgtgtaactgccggttacacttctccggattcaggcgaattcgtggcttctagatttccacccaaccacgaattgagacaagaaattagaaattttatcgggaacccagaatgggacgatccagatttgacatggatagatttccacattcaattggcgaaacacgccatagacgtggaaactaaactcaatccaaatttacaaattttctggcaaatggaaaaatctagtcagtcgggaagatatcatctccatttactgttcgtagaaggatgtacttccaggcaaattacatggatagtcaaaagaatgagaagggaactttgcaacaaagctgcagaaatgttgcacatgttttgtcctgatttccccaaaagtcaaatttggggatcgctggtgaatatccaaaacgctatgctttcactgaatagaggatactcaccgagaattgggaaaccaatcccccaaccagtgaatccatactcatttctaaaatactacatgttcaattctgctaaaatgagctttctgagaggggctactccaaaattagctgaaaaattaccaattggtacaagatatgctagatttgaagggtctcctgacctggacgagggtcccgaaattccatcgcaggaattaactccaggggacactctacctgtatgctatgtaagtactgaaactgattgggggaatggtgggggggagaccgtaatcaaaaccagtatcattgaaaaattatgcatggaagcattgagattatgcagagaaaatcacatttttaccatgaaagcatttaagctaaaattcccagacaaattcatgcaattcagttcgcgaaatcaggggttagtgaaattagaagaaacaataaacctatattgtgagaccattatcaacgaacacaatgcgtgggaaatagctaaatcaatacatggagatgttgacacagctgatctagatgataatttagccatccggttatgcagctaccaaggatatagtccaaagtacgttgctagactgatattgtgctggctatccggacaagcaggaaagaaaaacgcattatatttccacggaccagccaatactggtaaaacaatgatggcagaaagcatatgcaaaatggttcaaatatacggtaatgtaaatcacaacaacaaaaacttcccattcaacgactgccacaataaggcagtactttggtgggaagaatgcagcatgacagaagaacacgtagaatcagcaaaatgtatcatggggggatcctcagtgagaatagataagaaaaatcaagattcggtcctattatgtaaaactccgatcgttattacttccaataacgatatcactcaagtttcaagcaggaatgccatctcaacagttcatgcagctgcaataagagcaagatgcttaaaatttacatttaacaattggctaacttcaaattggggattgataaccgttgaacaaatgtaccaatttttatgctggggagaattagagggcattccgaacgtggatagtctcctaaaagatcatcccgaatttaacgggactttgccttataaccaacccaaaggtaaattttgtgccgattgtgttaaccagttcagcactgcaactaacctgaccgtgtgcccagcctgctccgggtggacaagaaagcccttctccgaagaagaggaacccccctatactggttctgaatccgggctctttgagaaagccaacgaaggtaagaatgaggtcccagggatttatcccgtaaatagtggatccaggttaatccctgaggccccaatcttacagaaaccatcgacctattgggagacggagatccccagcgaatcgagtggatttccagacgagccagacttcaccgcaagcgcaaaacttctcctgaaagtggacgatctccacctagaaagcgatctgaaagtggagcaggatcctctggagtgcaaaaagtgctgtctggttcaataggccaactcgaaggtaaaagcataacatttaatgatgatctaccttcccttactgagttattttgcgacgaaacgctccccccatccccgacatccccaatcaatctccctgaaccctctcgcgtggtacaatggggggacttcaaagctcaatgggtggaaggatacattggaaagtggagggttgcattttctaatttcatgtgttggtataacaataatattgcacaaattgaaacggtagaaggtgatccatgtactaatactaacgtttttcacgagttatatctccctatcaagcaacacgccatggacgcacgcatgctgaaaatgaaaatcgaagacaaaatactaaaaggcgacttctcacaagacgtacacttagacatgacattaacacaatgcattcaaacagcacttagcgatgacccagcagggatatggccatgtgtagacaggttagctaattactgcaatgttatattggcttctataggcacacaatgaaatacaaagctccgaaaggctacgtcccttcactacccactactgacgaagaagcatatcaccacactagatggtggctggatcatgttgaaaattatggaaaaaataaagctattggtagaggcaaaggaaaagctaggaaagagctcacaccacaacaaaaagctgaacgcaaacgcttttttatcacgcaggcacaaaaaaataaaaaacctaattacggcatcccatcttcatcgcagcacaaagagtttttcaaaaatcatcagggggcacaagggggaaaagcaaagcaaaaaaccaaacatatagaaaatcaagcaccacaaaggcaagaggacccagaggaagggcccgcacctaaacaacctagagtagaagaaaacccatataatcaagaagaattagaagaaatgatggccgatgagaatgaacctgatcaatctgggatccctatggaattgagcgatgggccgggaaccgtagggggtggtggtggtgggggaatcgggcattctaccggtaattggaattgtgatactatatgggctgaaaatacatgtaaaacctatgcaagccgccattgtgtctgtcttatgcgtgacatggatcaatataaagcaattggcaacgctaacgggcaacacgggttagacactgaaaaccaaacacaatatttcgggttctccacaccatggaattatattgactttaatcaatacagcgtgcactttagtccacgagattggcaacagctagttaacaattattcgagatggcgcccacgcgccgtacacgtgaaaatctttaacctgcaagtcatccagaaaacagtaacagatagcggtacccagtactctaacgacttgacaggcacaatccaaatatttgcagatcaagaaggcagatatcctaggttattataccctaaccaaacaactctaatgggtccatttccatccaatatatattatctgcctcaatacgcatacatgacaagcatgtttaattcgggtggaccaactgtatcatcttggtggggtttcccgacacgcgaaagcgcattttattgcttagacgagagcccatcgcaaatgttaaggaccggtaatgagtgggaaactacatttgtttttccatcgagtacacaatggtgtaacaataaaatatcaactgtgtccatcacacagagacaaaacccattatacgatacatggaacgttaatggcagaggcgatgacgctaaaagaggcaatttctgtacttggagaagcccatggtatccagggccttacatttacctaaccgatacatccgcagcatcacagcgtttagaaaatcttgctaacgttgccgtaggcccagacggcatgcctctggcaccaggaatgccacaatacagatcagaatccgataaagacgaatatctacatacattttgggtacctaaaaaagttaaaatgaatgaaggagacatacgtaacgcgcaaatagatgtctccactgcaaccaaagtacaagtagatacatcgacactatacaatacatgtcctagatcaggatacatgtcaactgtttcacagggaggggcacccgcacctattgtctggtcaggatgtgtaccaggcatgatatgggacaataggccagccacttacttcgacccaatatggcaacaattcccagagacagacgaacaattcaaaattatctctcaattggggggtatacctgttaaagaatcacctggtcacatttttgtcaaagtcacgcctaagccaaccggggctgcaaatggtttgatcgatgaatattgtacttttacgtgcactgtcgaaatagaatgggaattagaaccactcaatactcacagatggaacatgagaagcatgatttcgtacgagaccaccgatgccaaagctggaagacaaattgtcgatgaaaatggtcaataccaggtcaatgttaactcggctgacattactcgtctgtatatgaccaagcgcgcgccgcggaccaactaa

SEQ ID NO: 229 - DNA, 4615 bp, Turkey parvovirus 260; identical to SEQ ID NO: 228
  source 1..4615: mol_type = genomic DNA; note = Turkey parvovirus 260 / Aveparvovirus galliform 1

SEQ ID NO: 230 - DNA, 5205 bp, Chipmunk parvovirus
  source 1..5205: mol_type = genomic DNA; note = Chipmunk parvovirus / Erythroparvovirus rodent 1 - NC_038543
gcttgcccactgggcggcgccgctattgcgtcaccagctgcctttgatgatttgtagctattgaccaatcccgtctcttatgcagctccgcccagtgacgtggcagtctctggttggctgataatggtatattagcccgcgcacttccgtgttcagatcattatgcaccggtgctttcgtctgagcggacctgacgaggacccgtctgctgactacgaattctccgtcttggtggaagacctccacagccagttttgttcctgtgtctctccgggccttcatctacgacctgtttttctggtaccatggctcaagcttgtctttctctgtcttgggcagattgctttgccgctgtcattaagttgccatgtcccctcgaagaggtgctgagcaacagccagttttggcaatactatgttctctgtaaagatccgcttgactggccggccttacaggtcactgagctggctcatggttgggaggtgggtgcgtactgtgcgtttgctgatgctttgtatttgtacctggtgggcagactagcagacgagtttagtgcgtacttgctgttctttcaactagaaccaggtgtggaaaatccccatattcatgttgtggcacaggccacccagttgtcggcatttaactggcgtcgcattttaactcaggcatgtcatgacatggctctggggtttttgaaacctgactacttgggctgggctaaaaattgtgtgaatattaaaaaagacaagtctggacgaattttacggtcagactggcaatttgtagagacttacctattgcctaaagttcccctgagtaaggtctggtatgcctggactaacaagcccgaatttgagcccatagctctcagtgccgctgcgcgggacaggctgatgagaggcaacgcactttgtaatcagccgggaccggggccgtcttttggagaccgggcagaaattcagggacctcccattaaaaagactaaggcatcagatgagttttacactctctgtcactggttagctcaagagggaatattaacagagcctgcctggagacagagagatttagatggctatgtgcgtatgcacacctctactcaggggaggcagcaggtggtgtctgctcttgccatggccaaaaacatcatattggatagcattccaaactctgtgtttgccacaaaggcagaagtggtcacagaactctgttttgaaagtaaccgctgtgtgaggctcttgagaacacagggctatgacccggtacaatttggctgttgggtgttacggtggctggaccgtaaaacgggcaaaaaaaatactatttggttttatggggtcgctactactgggaaaactaatctagcaaatgcgattgcccactcacttccatgttatggctgtgtaaactggaccaatgaaaacttcccctttaatgacgcccccgacaaatgtgtattgttttgggacgagggtagagtcacggccaaaattgtggaaagtgttaaagctgtgttgggaggccaagacatcagagtggatcagaagtgtaaggggagctctttcttaagggctaccccagtcattataacaagtaatggggacatgaccgttgtgcgagatggaaataccacaaccttcgcccatcgccctgcctttaaggaccgcatggtccgcttaaattttgatgtgaggctcccaaatgactttgggcttatcacccccactgaggttcgcgagtggctgagatactgcaaggaacaaggggacgattatgagttcccagaccagatgtaccagtttccacgagatgttgtttctgttcctgctcctcctgccttgcctcagccagggccagtcacaaatgccccggaagaagagatccttgatctccttacccaaacaaacttcgtcactcaacctgggctctctattgagccggccgttggacctgaagaagaacctgatgtcgcagatcttggagggtctccagcaccagcagtcagcagcaccacagagtccagtgccgacgaggacgaggacgacgacacctcctcctctggcgaccacagaggaggaggaggaggggtcatgggagatttacacgcttcttcttcctccttctttacttccagtgactcaggactccccacttccgtcaacaccagcgacacccctttctccttcagccccgtaccagtgcaccaccacggacccccaacgcttctcccgacctcacgcccgacacgcgatctggcccgtgggcgcccgtctttccgccagtacgagccattgaaaggccggtgtgcggactcgactacgtttggtcgtccgtcttgggccgccccgtgtgcagtctacaacactgcggagctgactcgtcgtggagcaggtgtccgagttgtgaaggggtcaagaccaggtgcgatctctggaaagtgagagacgacctcgaggggcccagcgggggagatttgtttcgctgcgcgtatcacaccttggaggactatccatttgaggtgccgacgtctcccaggtgcgctatactctggagactctcagagtttatggacgatcaccttgattgtgttgggactttggacaattgggggtagtggcatgcccaagagaaagggcgccggggaggcttttcgtgtgttgttggatgagttgtttggggggattttgagtgtggggggggatgcctttgatgaccctgtatcagagcttgctgaacacttaactttgagtggaattggggatgctgatacatttaaaaaatggcaagaaaaagatttaagacacattgctcagctagttgcagaatttgagacgcagtacaataaaaaagagcttgataccctggttgtggatgaggttaaaaaggtggccaataaagtggttcccggattgggcgagacaggcgctgccgtagctaacacagccaagcggttaaaaactgacgaggatcccttatcctttggggcccccccactaacagaaaacgccccggttcccgttgcggagccagatgtggcaattgtttctgaaccaaacagagacactgctgcagaacaacttgaacgaggcctggcagagcctgatcacgggggcatccacctacccgctgaccggtatcttggccctggcaatcctctggaaaacggcccccctgttgacccggttgacgcagtggctcgtattcacgactttaggtacgctgacctagaaaaacagggcatcaatccctacacaacctacacaatagcagatgaggagctccttaaaaatcttgaacataaaacgggaggaagggcggcgatagccagggcattttttaactttaaaaaactgacattcccccatgcacatctacagggccccctgccagcggtaaaaagttggaagacagagcagcttggcctcgctgggatgcaacaagctagcgcggtgtccggtgcggggggagaccacacccctgctgcgttgtgggctcagggtgctaagtttagtggggactccgtcacgtgctttatgactcgcaggtgttacttaccgtttgatgaagaccccacttatagggcaatagcacatagcgagagtgataggagcaattttactaaaattatggtcaataccggcacacacacggtgatgggatataccactccttggcattatgtagactacaacaacatggctttgttcttttccccacaagaatttcagtacctcctagaaaactatgaagagatagcacccaagtcactcactacggtcctgtctgaccttgtagtaaaagatgtgtccatccaagaccaaaaaacccaggttacagatagtgggacggggggggtggctatctttgctgatgagtcctatacctatccctatgtccttggcaacggtcagcggacgttgccgtctgacatcccgatccaggtgtacgaactccctaaatatgcgtacctcacctgcgggaagcgaacagacgtagggatgaaagggggctctctccctacacatgacagtgactttttcttcctagaacatgctatgtttaagatttacaagaccggagacttttttgtctccccctactcttttccttccctaagaccccggagcctaatgggtgctagccaacattttttcatgatgcaaaatcccttgtatgactatggaatggacgtcttgactgaaattggaacgcacgggcaatggtcttctctagacaaatgggagtaccatggacgcccgcaaaatttcttccccggaccaaaaattccctctcatgtggctgctgagggagacaggggtggcaaggcagagctacaaaaggtagctactggaacttctgttggagatgactggtattctagatacacgtttaggccaatgcccagttgccaggcatactcccacgcagaccctaaagatccagattctgatattcctgttgtgtccattgacgcagtggctgccggacaacaatctgaaaagccaaagccgccacatgcaaaagaaagcaagtttccttataaacagggaagactgccaaatgatattgagatggctaaacagcttcaaggggtcaatgacaaaatgtatctagtgcagaccctagcgggacaaaatactacccccgcacaaatcattccactcatgcctggcagtgtgtggaatgaacgggctcttcactacgagtctcaaatctggacaaagattcctaacctagacaaaggatttatgactgaccaccctgctcttggtgggtgggggatgtctacccctccaccacaaatatttataaaaatgattcccacaccagctccctctgtagaaggggggggtaccacaagcacactacaccagtacgccatatttaacatgactgtgaaactagagtttactctcaaaaagcgaggactggctgggagatggaacccacagccacctgtaaatcccccgtccgccgtaggacacctgccttatgtgctgtatgacaacgggcaactaacaggggtctcatctgatgtgcaatctcaaaatggctatgaaagatctgacgagctttggactgcaaagtcacgtgtaagacacctttaataaatgatcaatcctcaaactgtctctttgtcttcaatagctacaaatcatcaaaggcagctggtgacgcaatagcggcgccgcccagtgggcaagc

SEQ ID NO: 231 - DNA, 4456 bp, Cutavirus
  source 1..4456: mol_type = genomic DNA; note = Cutavirus / Protoparvovirus primate 3 - NC_039050
atggctctcagcaaagagatgacagatggcatagactggattaaacaaaaaagagacaaactaggactaagcttcgtattcaagatcaatgatctacaattcaaaccaacaacagatggtcaattcatcacaatcaactggaaagaatacagaaaaaatccaagaaacgaagaaatcaagaaagtaattgaactagaccaacaaactgtgagtaacagaaatggggaagaaaataaaaaaattgatgtaacaacttcaccacatagaaatgcaatcctactcacaggcatagtaaaaaagactttatttgactactttaaaatcaaacaaattgaaccacatgaagttagttggtttattcaaaatgaattaggaaatgacacaggcctacacatccatgtgctcatagcaagtgacaaaatcaacaaccacagtggcaaatggatggttaaatactttgcagaaaaatggggcctatacttaattactactttaagtatggacaatgaacacttacaaaacctactaactcaaaccaaattcagaaaagaagtagaacaacaagactgggtgagtgtactacaatacacacaccaacaaaccaaaaaaaaatactgcaagacaatcaattttggtgaaatgattgcaaactacttcttaatcaaaaaaatagcaatcaaagaaaaagatcacggttacatatactctgttgacagtggatttaaactaaacaatctaagcttcaatgaaagatacttagttgctagacactgtcaacaactctttcgcagagacgcagaagcagaaataaccacaacaaaaccacaagaaaaaaaaaagaaaagactagaaactgccagagaaatatcaattaaagaaacagtacaaagcctttacacaaacagataccacaccagagaaaaatggatgcttggtgatcctgacacttacatccaacaaatagctcaaccaggtggtgaacaagcctgcatagccatactagacatagtaaccttaaaaatggctaatgaaaaaactgcatttgaactaatcatggaaaaagaaataaaaaaaaaagcaaaacaaaccaaagcatggaaattaattaaaaacaataacatgaatccaaaaaaagtataccatgcaataatgtgctgcttaaacaaacaaatgggaaaaagaaataccatcttactatgtgggcctgcaagcacaggcaaaagcttaatcagccaaaccatagccaacttagttggtaatgtaggctgttacaatccaagcaatgcaaacttcccatttaatgattgcagcaacaaaaacctaatatggatagaagaagcaggcaactttggaacacaagtaaactcattcaaagcaatcatgagcggccaagcaatcagactagaccaaaaaggaaaaggcagcaaacaaatagaaccaacaccagtcataatgacaaccaacgaagacatcacaaaagtaatagttggtacagaactaaaaacagaacacagacaacctatcatggatagatgcttaagaattgaattaaaacacaaactaccaggagatcatggtttattacacaattctgaaataccaaccatattcaaatacttagaacttcatggatttcacccaaccatgaaatcatacattgaaagatgggaaaccacgcctacttggggagaaaattggaatacaaaagctaaagaagcaagctcaaatctaccagacgaagaaagagaagaagaagaacacacaccacctaactctccaaaaccaacaactcaacaacaatctctggctgaaagccttgatcctgatgatcaagaatttgcaatgctcttaaaagacattgaagaaactgaaagagcattacaaaccatccctgaagaaacaactaacacagaagaactagctgcaacaggatatggccaaccactgatatccggaacggatgtgaatgccagctattagaaaagccagaggtaagtaaatatttcattatacactacacaatgcaaactacagaaaatcttctaaaagctctaccttgcttacttggatttatactcatgcttatcctattctgcttttttctcacaagctttctaagctcatacttcaactgcaaaaactggactaacttaaccaaacaaacaaaaaccttaaaacacaaacaaaaacaaactttaataatgggcttcctaccaactttactaagcctagcactagctctactaatatgggccttatttatctggatgttctacttcaactacaactacaaactaactcaaataaaaatacaaataactaataccaatttaacttataccatccaaccaatataggttgggtaccacctggatacaacttcctaggacccttcaatcaagacttcaacaaagaaccaactaatccatcagacaacgctgcaaaacaacacgatttggaatacaacaaactaatcaaccaaggacacaatccttattggtactacaacaaagctgacgaagacttcatcaaagcaacagatcaagcaccagactggggaggaaaatttggcaacttcatcttcagagccaaaaaacacatcgctccagaactggcaccaccagcaaaaaagaaaagcaaaaccaaacacagtgaaccagaattcagccacaaacacatcaaaccaggcaccaaaagaggtaagccttttcatatttttgtaaaccttgctagaaaaagagcccgcatgtcagaaccagctaatgatacaaatgaacaaccagacaactcccctgttgaacagggtgctggtcaaattggaggaggtggaggtggaggtggaagcggtgtcgggcacagcactggtgattataataataggactgagtttatttatcatggtgatgaagtcacaattatttgccactctacaagactggttcacatcaatatgtcagacagggaagactacatcatctatgaaacagacagaggaccactctttcctaccactcaggacctgcagggtagagacactctaaatgactcttaccatgccaaagtagaaacaccatggaaactactccatgcaaacagctggggctgctggttttcaccagcagacttccaacaaatgatcaccacatgcagagacatagcaccaataaaaatgcaccaaaaaatagaaaacattgtcatcaaaacagtcagtaaaacaggcacaggagaaacagaaacaaccaactacaacaatgacctcacagcactcctacaaattgcacaagacaacagtaacctactaccatgggctgcagataacttttatatagactcagtaggttacgttccatggagagcatgcaaactaccaacctactgctaccacgtagacacttggaatacaattgacataaaccaagcagacacaccaaaccaatggagagaaatcaaaaaaggcatccaatgggacaatatccaattcacaccactagaaactatgataaacattgacttactaagaacaggagatgcctgggaatctggtaactacaatttccacacaaaaccaacaaacctagcttaccattggcaatcacaaagacacacaggcagctgtcacccaacagtagcacctctagttgaaagaggacaaggaaccaacatacaatcagtaaactgttggcaatggggagacagaaacaatccaagctctgcatcaaccagagtatccaatatacatattggatactcatttccagaatggcaaatccactactcaacaggaggaccagtaattaatccaggcagtgcattctcacaagcaccatggggctcaacaactgaaggcaccagactaacccaaggtgcatctgaaaaagccatctatgactggtcccatggagatgaccaaccaggagccagagaaacctggtggcaaaacaaccaacatgtaacaggacaaactgactgggcaccaaaaaatgcacacacctcagaactcaacaacaatgtaccagcagccacacacttctggaaaaacagctatcacaacaccttctcaccattcactgcagtagatgatcatggaccacaatatccatggggagccatctggggaaaatacccagacaccacacacaaaccaatgatgtcagctcacgcaccattcctacttcatggaccacctggacaactctttgtaaaactagcaccaaactatacagacacacttgacaacggaggtgtaacacatcccagaatcgtcacatatggaaccttctggtggtcaggacaactcatctttaaaggaaaactacgcactccaagacaatggaatacctacaacctaccaagcctagacaaaagagaaaccatgaaaaacacagtaccaaatgaagttggtcactttgaactaccatacatgccaggaagatgtctaccaaactacacattgtaa

SEQ ID NO: 232 - DNA, 5183 bp, Dromedary camel bocaparvovirus 1
  source 1..5183: mol_type = genomic DNA; note = Dromedary camel bocaparvovirus 1 / Bocaparvovirus ungulate 7 - NC_035186
atggaagacttggctgattgcttatttcgcagtattcattctgatcataaatatcaacttcagtatcatacttatcatatatacagtagaactgctgtacagtgatcccgcttggagcgaatttcgaagaatcagggatttctagatggaagatgttatcgccttatgtgtagctacttatagtatcggaatcatcatagcggtggtcttcatagtcatatatctaaacaatagatctcaaagagaactagaggacattgaaacagggctctttggcaggaggaggagagaggactgaacatgtcctttccaactaccgatcacgaatggatcgaaaagtggtacgggagaatcactggcttcaaagagccatgctacacctacgtcctcaagatgaacgtgaaagagtggagaggatgggagaaacacatgatggacatcttcagcaaggggacctacggggtagtagccaacatggtggacgaggaacacgagaaggttctgacggatgcaggctacgactggcacgcgcagctgagcatgcacctgatgggaccacagggtttaggctactatctgtgcgaggcggcacacgaagcagcacgaaaactcatgatgctcaagcaacagaacatgagtccggagtttagcatcttctgtcaggcagagatgggagaaaaagatctgcacgtgcatgtggtactaggaggaagcgggctgaccaagttcaacgccaaaaagaacatggtctacctgggcaaagagttctataaatggctctatgacaaattcaaaatctacgaagagatgcacgacactagcaatcctcaatatgcgattgcaggctactggcagagagcgctcgagcagctgaagagacacgatccggaaggactagtcgacatcctaacctatagagatagacacggcaacgagcacgctcagagagtagacgctcaaagcttcatcaccaactatctactaccaaaaaacagacgcatctacgactttatgacagcactcatgtgcacaccagaaagcgctcgattcgagacagacaagacatacatgcattctaccatcgatcacgatccaatcactcactatctacgcaaaaagctacacgacaagctagtgggcaactctgaagaggagacggaggaaccgccatttaaaatggcgagatggggagaccttccaaaggtaacagaaaatagactagaaagcaagcagattataaacaggcctcagaaagtagggaaaaagaccaatctcatgctagacacactgcaaaagtgcgaggagaaacacatctgcacaatagaagagatgatcttgatgcatcccgaaattgtgctcatgtacgagggcctaccgggaggcaacaagacgctcgagagcatcatagagatgtacagggtcaaggtgaccagaacctacacggctctgggatacattgaaaagatgtactcgcagtttgacatagtcagaccagacaacaagatagtcagactgcttaatattcaaaattacaactgctggcaggcgggacattggatctgtaccgtcctacagaaaagggcgggaaaacaaaacaccatcagcttcttcggaccagcgagcacaggtaaaaccaatctggctaaggccatagcagaagccgtcaaactctacggctgcgtcaatcacttgaacaagaactttgtgttcaatgattgtcagaacaagctgctctgctggtgggaagaatgcgtgatgcacaacgattgggtagaaccggctaaatgcctgatgggggggaccaaattcagggtagacagaaaacacaaagactcggcagaacagccacagacacctctcatcatcagcaccaatcacgacatttacaaagtagtaggaggcaacacagtcagcatggtacacgaaaaacccatcaaagacagggtctgtgagtttgatttcatgaaagcgttgccacaagattttggagagatttctccactagaggtcgccgaatggctcctctgctgtaaatctgaatttgagtgtacgctcaatggcttcaaaaagcaatggggaatagaaaaagttcccaacaaatttccgatgcagcgtctatgtgctggtcattcgcaggattggacgctgtactctaacgggccttgccacgcttgcggtgggtatctgcctcatacaactactccggacggtgattgggtggaacaagagtccgatcagggtaagtacttcacacggggacgaccttcgcggggtacgaagggaatcccggtctcatgtctcttgttttgcagaagcacacgggattccaactcagtccgacgaccgggagaccgctgtttgtacttcgtctcccgcacaagaggtcgtcgttgaagaaactcctgaagctagcacctcttccggtacgtccaatggacaggaacagctggaagtcatctcgatctccagtgcggaggaaggaggagaggccgaagccctacgggaggccgagcaatccttggtggaggaaatcctcaccaacggatcacaagcacaatggccaaccgtcaaccagctcgtcgacgagatcctcgaccagggggagggagggagacagggagatgtcgacttctggctcgcatgctacgagcagccagaagagccgcaagaaggctaagacaactcctgccttcgtgttttcagaacacagggcacagacgggcgtcgagttgggattttgcggattttactggcactctactagattggcaaaattggggacaaacgcaatctttgattggggtaaaaaacagttccaatcagccgctgtggatggtagagttggatgggatgctgtcagggagatactctttgggtacaagcgactcctcgaccagccttatagaaacatgatgtggcactttagaatgggagagaaatgtgataaatgcgagtattgggatgaggtctaccagaaacacttggcacacgtagattcaaactgtgattcacctatggacacttcttctcctacagatcaaacagaattgacagatcaggaaatgctggaagcggttgatgcctccagctaaacagagaggggaatttagaggcatcctctttcctgggtacaattatttgggtccatttaatcctcttgataacggtgaacctgttaataaagccgacaaggccgcgaagcgtcacgatcttgcctataatcagtatttgaataaaggtctaaacccgtatttgaaattcaataaagctgatcaacagttgattgacgatttgtctgacgactcttctttgggcgggaaatttgcgcgcggagtgttctcgatcaagagagcactagcgccatctctgaacgagaaacagctggcgcccggtcgctcagccgagcagaaacaggcgcgaaagttgtactttgcccgtagtaataagggcgccaagagacaacgtctcaatccaccaactgacaaaccgactagcaatcctgataatcctaatatggaagctgagcaacctgtggaggaggagacagcgcctcaggaggcagctgcaggaagcagagcaggcgctggtggaggccctgcaaatgctggtacaggaggcgttggtatgtccactggtcagtggatcgggggaggcatcatcacaccaaccagattcgtcaccagaaacaccagacaatggtggtgcgagatcaaaaatgaacacaaatacaaacgatacgacgcaggaaccggagccagattctacggcttcagtacgccatggtcctacttcaacttcaaccaatacaacgggcacttctcgcccaaagagtggcagacgctgctcaatatagccaaaagatttagaccagtaagaatgcatgtcaaggtctacaacatacaaatcaaacaaattgtagacaactctggctcaggaggaaacacgctctttcaaaatgatctcacagcgggtctccacatcttttgcgacggcgaacacgcctttccatatacacaaaatccatgggacagaggaaccatgccggaacttcctacagaaccgtgggaactccaacaatacgcatacgttacctgtccgtacgaagccatcgacgatacacaaacaaacaactacgaaagagactttctagcacaagaaccattctacatgctagaaaacgcagatcacatgatcgtccgcacgggagaagccgtcgaattccatcacgaattcagctgcggatgggtcgacaacacacgatccgcgcagacacctgcgagtatgagcatgaatccaataattctatcaaaagaagtcttcagagctacctacaaccacgacacacataacgtactcgcaaaagaaaaccaaaaatcaggatactggaaaggaggaccaggaagaaacagcaaccaaacagcagtaccaaacaacgacccaaaatatgccatctcatcagaatattcttactataaaacacaacacatgcatgaaagcggaacaactacactactcgaatcaggaataggagtaggtcctccaacgggagcactaccggccgagaacgaaaaagacaaagtctggttctgtccatacgatcatccaactacggctcacgcaatgccgatagaaccatcaaccacaggaaccagaaacaacatgacctattacgtagattcatcaggacaaccacaaaagtacgagccagtatggatggcaccgaaccaggcgtgggattcagtcaacatcacaagatacaatcctatctgggtcaagactccgagagtcgacagaatgaccatggtcgacaccagagacggcacgataccgatggcgcatccgccgggaaccatctacatgaaactagcctacatacctgtaccaggaacatcacatccagaagactatctcaacgtctacgccacaggaaacgtctcagtcgagatcgaatgggagtacgaaacacacttcaacaagaattggagaccagagtacagaatcacagcagaaaatgtcatgggaaacgcagtctacaaagtcgacaaccagggaggatacatatggccaactcagcaaccagagctgatgtctaccagaagaggcatggagaaagtcctgtaagcatgcgcagaagacacgggtgagggagggggaggaactgcccttgtaatcaattgtatgaa

SEQ ID NO: 233 - DNA, 5189 bp, Dromedary camel bocaparvovirus 2
  source 1..5189: mol_type = genomic DNA; note = Dromedary camel bocaparvovirus 2 / Bocaparvovirus ungulate 8 - NC_035185
cggctcgctgcgctcgcgcgccctaacgggcgcgttccgtatcttgcggcgccatattcattgacgtcagacagtacacagtacagttaaagtataacagaaacaggcggggatgaaaggcgaccttagacacagactccgcctttttgggctcaaccaatcaaataaaaggtcaatacatacgcaatatggggtgatgggcgtttcggggaggagctaatagtatataaggaagcaatcaggaagagactcgtcatttgcctttggacgtcgacggggaaacatcgctcctgtggatacaatcaggtacctgctatggagaactcttggcacttggctaatttgagggacgaactggttcgctttcacaaacctgcatacacatacgtattaagaataccgtggccggttcagcagaatgaagaagataaatggaatacacctgaaggtgaaatagctctatataacatttcaggaggcagcgacgaagcaactataagatcagctcttctgaacagcaacacgactgatccgaatattgcagacgctactgcgcatgcgctaggagaacctggagaagggtttggacgacttatctgctcaacagcatacagagcagccataaaagtactggccgacaaacaaggatcaattacaccgaccgggagcgtctttgttcaatctgaaattggtagtgggggatggcatgtacatattgttgttggtggtagggatttgaataagtggaatgctaaacaatctaaaatactattagccggtcatttttggagggatttgattgtgaatataactgcaataatttctgcatttcaaagacctttaacacctagtgaaagaaatatctatgaacaactgtatttatcatctagacaggcggcaatagatccaagctgtactgtatctgtgcttcaatatagagctagaaattggcaatttcatgtgaatgcaattgatccaactgcatttattacaaattacttattaaagaaaaataggagaatattgtggaatttaactgggtatatatgtacaggtgaaacattttataatccattgtacgacaaaacatattgttgttgttgtttaaatggaacatttataacaactgatgatagacagcaattatatatgaacttagctacattcttagaggaacagaaaatggatttacatcctgagccttggcaaaaactaccgctggtaagtagagtgaatatagatagaacatcaggtacctcaggaaacaatcaaataagactaggacagaaacataaactactactaaatgttatggaagcatgtaaaaaacatttctgtattacacaagaagatcttgtaaaacatgcgccggatattttattactgatggagggaatgccgggagggaacaaatcaattgaaaatgtgttgtgtatgatgagaatacattttacacaaacaagaacggcgctacaatttatgagagacagactggaaaaatcatacacaggttttacaccgggatccagcagagcatggaaacttcttctactccagggatacaatccgtggatggtaggacattggatatgctgcgttttaaacaaacaagccggaaaacaaaacacagtctgcttctacggacctgcaagtacgggaaagacaattttcgctaaagctgtggctcatgctgttaagctgtatggaagcgttaaccacaacaacaagcagtttccatttaatgactgtgtaccaaaacttttaatttggtgggaagaagccatcatgcataatgaatacgtagaagcggctaaatgtttactgggaggaactgactgcagaattgatcaaaagcatacgggaagcgccgaatgcaagcaaacacctgttataatatctacaaaccatgacatttatacagtatacggaggaaattctgcatcaagagtacatgaagctcctttacgagctagagttgttcaattgaactttatgaaacaacttcaatccacatttggggaaatttcagaaaatgatatatactcattccttcaaacatgtgcagacagatttgattgttcattacaagggtttttggatgaatggaatctagagaagatgacaaaccaatttcctttaacatctttttgttctggtcattcacagtcgcttgtgtacgaagagcaaggcgtatgcacacattgcggtggttttattcagcctactccggtggacgacgaagacgagtctgatcgtgtgtctgaagcaggtaattcagaacctgatttatgggcagaagaggaagacttggatgatccttggtggggggaagaaccttgggacgatacagatactacatccgggtacgagacagccacagaattgttaaacgatggtgagtggcaacaacttttacagtcaactttggaagatacagactttgaatttgacttgagtgttttcgatattttagaccaagaatctgattcaactagcgttggcaacggtgaacgtttgcttcctgacgttgatgatcttagagcccctgttcaggaaccagaggaagcagaggtcgtggtgggagaggctgaggactacgaaccgcaagcgaaaagacgccgactagactctgaaacacaagcggcattagaaacggtacgtcataatgtcgtccaaaacctacaatatcaagaaagacaactcgtatgggacgaacaaagaccagaaggagatccagactgggacgactacggggaagatgacccgttggaaggaacgtccacatctcgctaaaactccatactcgtttttcaacgagcatagagccaaaagaaaagcggatgaaacggacgctgaaatcgttccaaataactgtggttttcactggcacgctactagattaacttcaaggggaacaaactttatattcaatgattgtaaaacagaatttcaatcaagggcggtggatgggaaaattgattggaatgaatgtaaagaaatattgtttaaattaaaaagagaactagacaaaggatatagaaacatgatgtggcattttagaaataaaagagattgttttccgtgtgaatactgggacactgtatacagagatcatctcgatgaaatggcggcaataaaaaatggtgaaccgtcagacgcagagatgctcgctgctgtgtcagaataaacacacaaataaataaataaaaaaaataaaatataaaatatacgtctatgtctattttttataggtcaatgaaaatacaacacggctcaagctattccattgatcatagacggtctattgaccgcctatgaaacgggtaaaacaataaaagatatcgtcgattactttaaacaaccaaaagaagaagaagaaccaaacacagccgcagaactgccgcaagagggattactgggaggagctcccagtaaaaaacaaacacgtgctgaaaaaagaaaactttacttcgctagaagcaatctaaaagccaaaaaaacaaaaatggatgcagtagatgccggtgaaaatgctcaagaaacaacagccgtcgaaggacgagcagcaagtagctctgggccgggaggtggtggtggaggaggaaactctggagtaggctatgccacaggcagctggaagggaggtaccatttttggagacaaatatattgttactagaaacacacgccaatggatggcagatataaaaaacaatcacatttacacaaaagaaacatggggaggtcctactgcaacaaggccagttggcattaaaacaccgtggtgttacttcaactttaacgaatattccagtcattttagtcccagagactggcaaagactgatgaacgaatacggtcgttttagacctaaacacatgaaagtacaattatataacattcagataaaacaaaaactgataacagcaggtgacaccatatataataatgacttaacagcaggtatacacgtattttgcgacggatcacatcaatacccatatacacaacatccgtgggacgaagacaccatgccagaaatgccaacaaccatatgggaccttccacagtacgcatacttgctagcgtatgattcttacataaacacagatggaaatcagtttgaaattgactttcaaagaacattaccactttacattttagaaaacagcgatcacgcaatgattagaacaggggaaaacattgaattcaattttgaattcaattgtggatgggtaaataacaactttacaaatatgacggtcggacaaatgtttaacccgatggtaggatacaaaagaacaacagaagacacagtcgatactaacagaaaatataatgtagcatcattttgtaaatattcaaattggaacggaggaccaggaatgagagccctaagaacaggaaacacacaagacgcagaaaatcaagctggaggagcaggactactgcagacgtcattgttgtacggagcagaactgggaactggaggagttccatcaagagcatggggtacccaaccaaacacatacggtcaaggatcaacacacaacaaagaccattaccaatttgtaacaggaacagaagaagcaacaacacaaaatacaatcacagaactaaactacaacatggcaagcaacaatgtcacatactttaaaaatgacagctacgtagacacagaacttaatccagtatggatgtttccgaaccaaaaatgggacagcgtttcaatcagcagatataatccaatttgggttaaagaaccaagagtagacagaagcacactagtggacacaaacgacggaacaattccaatgcctcatcctccgggaacaatttacttaaaaatagcaagaattccagtgccagacgtaagcccagacacaacagattcatacctaactctatacgcgacaggacaagtaagctgcgaaattgcgtgggaagtcgaaagaacacacaacaagaactggagaccagaaaactacctaacggcggacgagatgcaaacaggagtttaccacattgatgcaaacggagtctacaaaagaccaacaacatactatgacgcaatgccaacaagaagaacaaacatcaaagtcctgtaatgtactttgtaccctcatattaatgtttactcgtattaactttgatcaataaaggcgttaacctttcgcgtgtttctgttat

SEQ ID NO: 234 - DNA, 5065 bp, Eidolon helvum (bat) parvovirus
  source 1..5065: mol_type = genomic DNA; note = Eidolon helvum (bat) parvovirus / Tetraparvovirus chiropteran 1 - NC_016744
tgacgtgtttccttttccggtgacgtgtgtccggttccggtcacgcggttcctgtgacgtgtttccgtttccgtttttaggacacgtcgccttccggctccgcccctaaccacaaaccactcctaccacgcctataagactagtatcaccctgagacttgtcctctttcaaccatggacgtggagtgcgttattgctgtgcttgccgtgcctaagtcgcactacgccacccgccacccccagttttgggtgaagggtccaactgacaagtactgggagtccccaagaagcatggtgggagagagatttgatgcgccggtgggtgagtctgacgactggccaacagaagacctggaaggccttcccgtttttagagacgcagtgtttatggggaccttactgtacactgctacgattcgcagcttttactgcatttttgccgggcgggctccaccactggtatttttgcagttggagccctgcacgtccccagacctagagtaccacttccacttagtggtgggagctgaaggccttaccggacgagactactcctactggctgagacagctgggacggtttatgtttcagtacgttagctgggagtggccctacaagtgggaggtgaagaagactcggcagggacgcctgtaccgggctgaccttggttttgtgacgcagtacctgctgccaaaggtgcctctgaacggttgttggtgggcgtggaccaacattccaaaatttgaggccgccagacttaataagcgggttcgccttggatggaacaccggaggagccatacctattgaaggagctgccgctgggaccagtggagctatgcgccacgcgggaccgcagctggaaggcaagtcagctgagcgctttttaaacctaattgactggttagtggatcagggcatagccacagaaaaaaagtggttggaagcggaccgggatggataccgcagttttttaagcagcagcggtggtgtcctgcaggccaaaaacgccctaaacattgcgcgccgggaaatggttttatcccagcctttggtccggtacttagccaaggggggcgcgtgggatgagtttgacagcaaactgtgtgatatttttaggctaaatggctacgagcccagcttggtcgcccggtacatggcttgctgggcagtgggacactggcctaagcggcgagccttatggctctggggccctgccagtaccggcaaaactgttattgccgcggctatagccgcgcaggcccctagctacggctgtgtaaactggactaatgccaactttccttttaatgactgccactgtcaaccgctagtgtggtgggaggaaggccgaatgactgaaaacattgtggaagtggccaaagcaattttgggaggatccccagtgcgcctggacgtgaaaaataaaggcagtgaagattttttgcccaccgcggtgattataactagtaacggggaccttaccgtaaccgtagacggtcctgttattagcgacgcccaccaagatgcgctgaggacccgcatgtgcatgattaggctggaaagagtgctgccggcccacttagcccctgttgagccgggagatattcatggcttttttaagtggggcgcagatttggttgctgtgcaaggcacacctgctgaggtgtttgaggtgccacggcgacatgaaactgaagacatgccaaatatagaactgttgccaagagacctagccaccgaaagtgcccaagctgcaggtgaccactcagaggcggcaacgtggagcagcgaggaggagtggtttgcgcgcacaaaccgcaagcgcagatttagttcctcttcggaggaggagggcgtagcggagaagcgcgttcgaagcagcagcgtgtgctcagtgtcggactgggtttctggtccgttccccagcgaagaaagcagaaggtatgggtatgactgtcggtggtgctttttggaaagccgggggagactggtggatgcagttacttacgcaccttatcctgctgttatttgcgggaaagcagacaagggccggtggagtgtgaaccgcctgctgaaccgcccgtgggaactgaggctgcccctaagccggctggaagctcagcaaactcggctgaaggacacaattagcacgtggtacgtagaaaaatacgtaaataaggactctgtgttttacagtgctgctgacagttgcctccattgccaggagagcattagtccggaacagtactaacttcccttcctgtgcttgcaggtaagatggcgtccggcggcgtcgcattttttatgcctacgggggaaggagggaaagccattagtaagctgtacgacggcgctgtgacgggatggtctcagtcccacttacggcacggacactaccgcgcaactgcgctgtctggacttgtgtatcaaaaagcttttgaaaacttagacgcctttgctaagcatttaccgccctctttgcggctggtacaaacgctgtacaacaacatttctaagcagcgcaataaaactgcaaacactgagtggtggtggagggtgtacactgactgtactcggctgctactaacggtagctcagccgcaggcagcagacgccctacgcagagcttggaatggaacttctcctttacggccacccgctcagcaagtgctgcaaaacgtgtatatgttagcctacaacagtcacatcccctctgaggaggacttaaatactttttttgatgagtctgtgctgggcagcgttagcggagaccccgaaaactttgcttttgtgaagcaggcagtagttagtgcttttcatcctgcagatggaggagccgctactgaacagcgctctgacgtccctgaaagtcctagcccccctagtgaatcagaccattcacagcctagcggaggtggtctccttgtccccggctacaattatgtgggtcctggtaatcctttggataatggcccccctaagggcccagtggatgaggcagctcgcaatcatgacagaaggtatgacgaaatgctttcccacggggacgtcccctacttagacagccagggtgtggatcagcttatgaccaaagagattgaggatgcggaaaagaaggagcccctaggcccaatagacgcattggtggccaatgcggccagggcgctttggaagggaaaggaaaccttggcctccgtaataggagatcagggacaccaggttttgccccctaatcctccctctgttgatcaggggtcccatttggggagcaagcggccattggaagagtccgaagaaaacagcgattccttggcgaagaagttcaggcctgggagcagccctaaaagcgacctcgaaccgagcggtggaactgcgcctacagcgcctcctaaaggcgcaacaatgtccactgaagccgagggaagtggcggaggcattaaagttaaagctctgtggaccggaggaactgagttctctgacacttctatccacactagccatactagagttgccttgttggcggataggggcacatacatgcccatttacaggccaggggaaactactagtgtgattcagccgttactgggcatggttaccccttacagctacattgatgtaaactctcttagcgcccacctcactcctcgtgactttcagcagcttatagatgagtatggagaaattaggccaaagtctttaaccattggaatttctggcattgttgtgaaggacgttagtgttaacaccacaggcaccgcggtgacagatagcggaagcggcggcattactgtgtttgctgatgagggctatgactatccatatgtgttaggtcacaatcaggacacccttcccggacacttaccgggcgagcactatgtacttcctcagtatgcttactgtaccaggggcagggaagtggttaacgccaacaaaattgacatcattcaggaccaccgcacagatttttttttgctggagcaccacgacgctgrgtgcctaaattcaggggacacctggtcccacacgtactcttttcccgacctgccctttcgtaggttaacataccctagccaacacttgtacgcgcagcacaacccgcaaatgaaaagccgcctaggggttttccgcagtgtagatcagaacggagaccccgcgtggcaaaggttgcgcggcagcgatataggtcaattgccatgcaactacttgccggggccacaggctaacctgcctaccacaagtgactttcaaaagggtgattccatgcttcctgctgctataggggaccccattactggggacagatatactgtaactcctttggtacatcagccgtggtccatggttcacgatgagtacaataacactgggcaacgtacgcagtcagttgtgagcactgttggcagtgttgcttatatgcctcgcaagcatgaggagtcttatgggtcacctaacgatgcgctaactgaaattacaacccccatgcgcgtggtgcaggaacaggctgatttggtgtctagccggctgggtcatacttttatgattccttctttttcccgcaaggctggttctgcgtcaactaccacatataatgagccaatgtttccacttctacctggtgctgtgtggaaccctaaccctttgacttatgactgtcagatttggtgcaaagtcccagacacagagtgtaagtttatgacccagtatccccttttagggggttggggcatggataccccgccgccgatgatttttttgcgcattaggcgccagcccgggccccctggcccgggcgcccacactgtgccgggcagcacacttaatcaatatgtgatttttcacttacattactccatggagtttgaggttcgtcgtcgcaagcgttcccgtcgccacaatcctgaaatgcctgctcctttccctcaaacttggtcggggaaaatgccttatactttgtcaacggatggaaaatccggtccggagtacaatgtgccgcgagatcagtgggttgcccgcaattattctcaattgctttaataaactttgctttgctttatcctcctg

SEQ ID NO: 235 - DNA, 4743 bp, Equine parvovirus H
  source 1..4743: mol_type = genomic DNA; note = Equine parvovirus H - NC_040652
atggagaccttttggtacggggtggtaaatgccttcgccgatccggtgaagagcctcccaggatgcacgtatgaggcacctttctttaatgtggctctcacttctcgttctaatcagatgtgggatacaatacagtcgtcgccgtatgccaattgcgcgagactcggcgagtggctgttccaactgctccggcgccagatcagcctgcaccatcggcaagccacggaaccggccatgttcctgcaagccgagaaggccgaaggggacggcggtcggctccatatccactacgtcgtgagcacgagcctagggaatccccgtgagtgccgcgcgctctttaatgcggtggaaggagagctcagcgctacgctgcttcgggctgggctgcagttctttcttccccgcaagaataaaaatggcggctggcagtcatgcaacgaggacttcattgtgtcctatctgttgcctaaacagcctccacacaatgccatctacgcctggaccaatatgtctgggctggttggtgacgcctgtctaaataaacaagtgcgcgcgactctcacgaaggagagaccctcgacatcaggcaacataggccccatccatcgtgctgtgcaaggcgacaagttccgcgacctcgtggaccactgcatcgaaaacttctgtttcaatgatgaagatctaagagatcagttcccggaatgctggttcagctttgcgtgcacaacaacggggttaatgcaattaaaacaagccttcaaagtggtcgagagtgaactaccacgtaaatgttctgccggcctagccattgtgcggtgcttaaagctggacgacgtcaggagaagagcgcaacaaatgcagcggttcgaacccgcaaacaacaaagtctgccaactgctaaccttacaaggctacgattggcaagaagcttcctgtctattctgggcttggagtaccaaacagacggggaaacgtaatgctatctggttaacaggagaacccaccacggggaagaccctcctggcctcggctatcgccaatgcggtgaaacactatggctgtgtgaactggactaacgaaaatttcccgttcaatgacattcccgggaagttactggcctggtgggaggagggagctatgtccagtaaagtggttgaatccgctaaagcactgatgagtggcgcgagcatccgcatcgatcgcaaaaacaacgacagcacactatgtcgtcctcccccgtttatcatcacttcgaatggtgatatcaccgtcgtcacggccggaaatgtcttagacttcagccaccagcaagcattagaagaccggatgtttaagtttacatttgaaaatcgcctacaaccagacttcggtatcatctctaccaccgacgtccaagacttcttcctcatgggatatcgattgctcaacgtcacgcaccctgacaactcctgcctcaagcaaggggtccggtatgctcctcacgtcattccgaaacgttatttagctgagttttacgagaagtctgaccccatagaagatgctgaggctgctgagccactggactctccgccttctaaacgcgtacggtttgctgagacagcgacgatcgctcctaccgacgtctccaacacccacccaagagcggaaacgtcgacgtccgcagccggtgcgaccaccgaaacgacgacgtctgcgatagccgacgaggaagatttcagcgaccttctcgagtacctggaaacgtgtggccaggcgctagaagccgaggatcaagaacactgaaacgtaagttttcacaccatgggtaacgttagcgggcacttaaaagaacagcgacgggcggacaggaaaatcttctataaagatatgccgccatttgaaaaggccaccgctcaggatttctctgactattatgtttctgacggaatgccttttcagactttgtatgataattacgatgtcaccagatatcgttggttcatgtttaagaccgaactagctaaaaggcttgtagagttacaaggacaaaaacttttcgcagatcaagctcgtaatacgctagccgctttgaacgatgataagtttcccgaggggcctgaaggcgattggacagctgtccaaaatgtagcctttggtctgaaagacgtgggtaatgtgaaaaacccagtgaaggctatgttagctaaagccctgcaagatcgcttcagtcttcgaggcccaaactttgaaaacggcttgtacgttgctcctgacctgaaatggatgaatttcaaagtagagagcgatgaggagatcgcagaacgcaaggcaaaagacttagcgaaaaaagagttaagaaaagaaaacgaaatgttagtgaagcttgaacagtctgttatgtctaaagatgctgctggactcctcttcccgggaactcattatcttggtcctggcaatcctgtcccgaatggccctcctgttgataagctggacgcggcggcagctaaacacgatatccggtacgaggcgatgcttaaacatggcgatatcccgtatttaaaacataactgggcggatgaagctatgtcgagggacttagaaaaagatgagccgaagtcttgggtgggcaacgccgcgcgaggtttatggcaagttaagaaaacaaccacaaacgttgttgcgcctatgattgatcctgtattgccagtaaaacctatggaaagtgaatcgttaaaagtgtcaaaagccgagcccgacagcagcagtaacagtactttgtcttccccgcagaaggacggccaaaaacccgccgaaaaagagaggcagacatcgaaagaggccaaaccgaagaagaagaaacgactccgtctcaaagtctccagcgaatcatctggaccggtcaaccataacatggcttcctcgggcaacgggaatggattagactcagacatgggagatggggggggaggggaacatgtagataaagaagcggcgggaggaggaggaggggcgcccgaatgtgggggaacctggtggggagggagtaaagtcaagggacaccacttgaccacctttcaaacacgtcgctgcattctgagtccgtggcccgatcagtatcgtacccagtataattatagcttagtaccagaggtagtgcacatcacgccatggagttatatagatttaaattctttatcagctcacttttcgccgcatgatttctatcaaatgatcgagaatgcagatgctttccgaccccgagccctgacactgaagattcatgagctagtctttaaagatgtaggaaagaaggaaaacaattcggaaactaccgtagcggattcgggatctgcttttttgtcattaattaacgatagcaactatgactttccatatgtttctggggcggggcaggacacggtcccaggacatttaccaggacaaccttataatctacccttatacgcttatacaactgtcggtgtggtagggacgatctgtgagaaaagccgttcagcgaaaacgttacccactcagaatagtgagttttacctgctcgagaatcaccctgcaaaactcttacattccgggcaatgttgggaacatacctaccacttccctgagctaccatttgagaagttaactcaatacgtatgggatacccgtagacagtataatcccattcaaactcagcgcttcgtccttttgaaacggcctgctggccaagagacgagcactgatgagaccgcgcaaaaagcctggaataacaagttacaagatcagtttaataagcatgctttaccgtatgatcaagagaagatgcccagtcagtggttacagggaccccggcatgcagatggagatctcatcatcattcatgattgggatcgaatgaaaagtctcgtaaatcaagcaggggattgcttgagaggggtacaagctcctcaacccaaaaaagctcgtctcacgggggagccacctctaattgttactcgggatacctttaagcagctgacagtatatagtcgatcagaaaccttacagcccggtccccagactcaacaagctgcagagattactcccgatggtacaaccatcatttccgccaacacagtgggggtaatagaaaaggcccatgagaaaatgttaaatcccggggctgtggagggatacatgcgccttccccttctgcagaaaatcgggcatcaagaccccaccgatccaagacacatccgcgaggtcgagtaccccaaaaccgctgaagacggttgggggaatgttgggactccgactacaaaagaggtatcctatgctatgatgccgggccaagtattagaaaaaccttctggtcatctagagtctcaaatctggacgaaaatccccaataccgatgatatgacaaaacccactatccctctattgtccttatgggccatgcataatccaccaccacaagtgttcctgcgaatgtttcctcaatttgggccccccggtagtaaaaaattttccgcgtcggtacagacaccaacattcctgaaccaatactgtcaattccttctaagttacagtatagagtgggaactcataccacgatcccatcgtaaagcacagtggaatccagaacccaatgtggctatgccaacgaatattaagggacccccgttccaattgtcgggcagcaacgacgagtatcacctgcccacccacctatccatgatgcgacaacgcgctcgtaccaaacggtaatgcaataaaatcgtgttg

SEQ ID NO: 236 - DNA, 5479 bp, Feline bocaparvovirus 2
  source 1..5479: mol_type = genomic DNA; note = Feline bocaparvovirus 2 / Bocaparvovirus carnivoran 4 - NC_022800
caggttaatctaacgcgcgcgcgaagcgcgcggcggcgaagccgccggcgttatttaaccggcgcgatgacgtgtcagtgtgggtgttgattctagatgatagaggtcaacgattaacctgactagttaatatgcaactaacacacctgttaaagattaactatctgtaatctgattggtcagcatgttaaacagatgggtggagctatctgtatatatactgctgcaacttccgtgtaagctcattctgcttccggcgtttgagctgatcagacctcctggagacctcacgcttcatccgtgcggtgagtcgccagcaatggcagaaatccctcttgctagtatccacgattttattcaattcgcggatccagcatacacctacgtgttgcgtttaccattacctgactattcagattatgagaaagctctccagaatgcgttatgctctgactatccggacctactggacaatattgagatgtttgctacaatgccaggaccagacagtccacgcgctcaacttgattttctggagcgttacggtcctgagaaaagcttctgcgtagagttagctcacagtgcgcatatggctgcgtttaatatgtttagctctaagcagggaaaggcgcctccgattgcaagcatctttagtcagtgtgagctgggaaagaagaatatacatgtgcatctagtcattgccggagatggattgaatagatactctgcaaaaagtactagctatatactagggcataaatgggcagataatataatcgccattctagaagatagaatctgtaagaatcggctagctagtacgacctttgcactctcgttaataaacaacctgaaagaggctaaacgacactgccaacctggcaactctggtgacctttgtactgtgctgcaatataagagtaggggaggtggactttacgcttgccgcatcgatgggcgcgaattcatctgcaattatctgctaccaaaaaacctacgatacttctcgtgtgtcgatccgtctaaggcgacaccggctgcggctcattttccactttcgtctaaaacatacggcatatctttcatgaatgggaaattagttccactgaacacgagacgtcaatggtggaacgatcttagagacaaggtgcttgtaaaagacgaaccggtattttcgggtgaagtatttggagaccttccaaaggtaactcgttcgtcttggaacatagcgaatcattctgaattatcgggtgggcaaccacacgtcaacacaaaaatgaacaaaaaagagggattaattctagactgcttgcgccgttgtgaggataatttgtggctaacgtatgaagatttggttgctggatgcgctgatttacttttaatgcttgaatctatgcctggtggtagtaaactaattgaaactgttttaaacatgctgcatgtacgaatcactcagaatcacagtgcctatagctacttgcaagttagatttaattttcgggaactaacatcagacagatccacgctctgtactaacaagtgctggaagctacttttaaagcaaggatacaatccttggatggcaggacattggactctgtgtgttctttcaaaaagggcagggaaacaaaatactataaatttctttggaccggcaagcaccggtaaaacaaatatggcaaaggcaattgtcaacgcggtacggctatatggctgtgtgaatcatcagaataaaaactttatctttaacgattgtgccgcgaaactcattgtatggtgggaagaatgtgtcatgcataacgactgggtggagcaggcaaagtgcattctaggaggaactgaatttagaatagatagaaaacacagagagtctcatttactgccacagacacctgtagtgatctctacaaacaacaacatatatcaagtcgttggtggaaattcgattacacatgtacacgaggctcctctgcgagacagagttgtacaatttaacttcatgcagcgtttagaatcaacatttggagagatcactccaacagaagttgcacagtggcttgcattctgttcttctcgattcgacatttcgttgttgggattccatgctcaatggaacttgcagaaaactccgaatgactttccgctgacaccattctgttctggacattcacaggatctgacactgtacgagcacggtgtgtgtgacgcctgcggcggatactatcctcttgagacaagagaccgcggagacatcgaaaacgccattgcaggtacaccatctttcaatatgccttcaaattcagacttttctcattacatagaccagtttgatctaactttattaaattctccagaaacacctgaaacaactccgagtactagcacagacggcggcagtgctccagacgctcctaagaaacaggtacggaaacgccgkcattgcgccaagcgtctgtttacttctgtgtgggatagccagccaaacgacgatgtcgagtggagaatgctcgaaggacgcgaggaaaagacaccacgacaggaatcggacgccgagtccagtgccgagcaagaagggtcgatggagcttgagctctcaccgacgcagtggggagaaatgctcggtctcgtcgccggagacatcgaatcaggagaaccaccaatcacgctccactgcttcgaatcactcactgacgaagactgggactctctatagtgtaccctttgtaaaggttataaaaagcaaatataaaaataaaggaaaacctacaccattagatgtatttgttagacataaagccaaatcaagtgatgattgtccaaatttttgtggattttattggcatagcaccagattggctagatttggaacagattatatttttaacatagctaaacctcaattccaatcatacgcaaccaataatctgatatcttgggatcaatgtagagatatattgtttgaatttaaaaaaaatgtagacttcaaatataggagcatgatgtatcattttgcactgggggaacaatgtaataaatgtaattattgggatcaggtatacactgctcatctggctcatgtgtctattcccactatacaggaagacgacgaagagccatttgaggtaactgataatgaaatgctagcggtcgccatggaagtcgatggcaccaaccaatagacgtcctggtggttggaccgttcctgggttcaaatatctgggtccatttaatcctttagataacggtgatcctgtaaacgaagtagataaaactgctcaaactcacgatagagcatatcaatcatatattgatgctggaatcaatccatatttgaactttaataaagctgacagcgattttatcgaatcattgtccaaagactcgtctgtcgccggctggctcggaaaatctgcttttaaactcaagcgtgtgttattgccacatctagacaaacaaagggaactagcaggaggtcggggaggaaagaagccaaaactcacaccagagcaagctcaaaaaagaaaatactatttcagcagacaatatccaagaaaaccaaaagaagccaaaacaaacaatacagacatgggagatgcagctgaacttaatggagtggatggtggtgatgggggtggtcaagctagagcaggcggtgggggtggcagcggtgttggcggctctgggggtggcgggcatggcgttggtgttagcactggtggttggaaagctggtactgtattttctggaaacaaaataatcacaaccagcaccagacagttctatgctcccatatacaacgaccatctctataaacgtatttgggagtcagctccatctagcacaaacaaaacatgggtagggatcagcacaccgtgggggttctttaatttcaatgaatatgacgcacacttttcaccgggagactggcagacactagtaaacacatatgccaaatggagaccagtgcatatgcacgtaaagatatataatctgcagataaaacaaaaagtgatactaggtgctgacacgctttacaataacgacttaactgccggtgttcatatattttgtgacgggtcacaccaattcccgtattcgcagcatccatgggatcacggcactatgccagaactcccatacgacacatggaaaattccacaatatgcatactttcaaatgtacgcagacttagagccagatgattcaggaaaccaaaacctaaacgcagataatgtggaaaaaaatttaacaagaaacgcaccattttttgtgctagagtcagccactcatgaagtactcagaacaggagaagaaacagaatttaattttgactttgaatgtggttgggtaaacaatactagagcatacagtctaccacaatcaaactttaatcctctagtaaacactagaagatactatccagtatatcaacaagacgccgcatccaaatttggttacaggagatattctccgtattcaaaacctagcaattggatgccaggtccgtctataggatatttaggaaacacagactctaatcaagacaacaaccacggaacagcagctagagggcctatcaccgtatgtcctcatccgtatttcacaacaccatcagggtcaacacgtgatcctcagagtgcaaccaacataccagacaggggaggcgtccaaaaaggagggtatgacgtggcacctacaaacggggcatgttccagattagactctgtctcactgtcatttgacgcaaccgaaaaaagcacaaacgaaccaaaactaatcaccagaaacattgacatggatctatccagatttggatccgtgtgggcatgggacggattaagctcagagataaactcaaatggacaggtacaaaacacaccgagacaaaacctcgcacaacttaaaaatatctggatgtatcctaaccaggcatgggactcaacaccgatatgtagaaataatccaatctgggacaaattaccaaacactgacaaacacactatggtagactcttctgacggtacactcgctatggcacatccaccaggaacaatctttataaaagtagcaaaagtacccgttccaactgacaataacgcagatgcatacttgacactatatgtaacaggacaggtcacatgtaccatagaatgggaggcagaaatggtgaaaaccaaaaactggagaccagagcttagaatatccgcaaaccagttcacagatgcgtatctctacaatgtcaatgaaaatggtatttacaatactccagaaacattcactgaagccatgccaaccagatatggaatgaataaaaacatgtaatcacaaatcgtgtcgtcatcgtcatttatttcacattgatctctatttctcttctcaacatcacccacactgacacgtcagtatatgggagtgtcttaataaattgtaatgactcatttaataaattttgcatgctgtcgctacacctggaattcta

SEQ ID NO: 237 - DNA, 5407 bp, Feline bocaparvovirus 3
  source 1..5407: mol_type = genomic DNA; note = Feline bocaparvovirus 3 / Bocaparvovirus carnivoran 5 - NC_039044
acgcgcgcgcgaagcgcgcggcggcgaagccgccggcgttatttaaccggcgcgatgacgtgtaagtgtaggtggtatgttaagactataaggatcaatgataggttcagccatgtaatgattaactgacctttaacatgattggttgagagttaatgattaacacatgacctttacaatgattggttctctgaacctataaaaggagatgcatttccgtatctgtgtcattctgcttccggcgctcgacgagagaggaactcctggagccatctcgatacctgcgatcggtgagtcgccagcaatggctgaattcgatctggctagcctcgacgatttcatccaatttgcagacccagcatacacctatgtgctgcgtctaccactacctaaagatcagaattatgatgctcatctacagaaagcattatgctacgctcacgcggacatcttggatgatccgctactctttgctgccatgccaggaccagaaagtcctggggctcaagctgattttctggagcgctttggtcctctgcgatgctttgggactgaggtgtgttatgctgcgcacatggcggcatttcacttcttttgcacaaaacaagggaaaagaccaccaatagcgagtatctatagccagtgtgaaataggcgcagaaaacatccacgtgcatatggtgctggcgggagacggcctgtccagattctcagctaaatcaaccgcgtacattctggggcaaaaatttgcagacaacctaatagcaatcctatcctcaaatctgacaagcggtaacattagcaatcctagctttgcttcttcgctaatcgccgctctaaaggaagctcaaaaaaaatgtgagccaggcaacgctggcgacctttgtaccgtgctgcagtacaaaagccgcaatggcgccaggtatgcttgtcgaatcgatccgcgtgagtttatctgtaactacctattatgtaagaatctaaagttcacatcctttgtggaaccggaaaaggcaactccgctatcagctttctttccaatctcttctaaaacatatgcctgtacactaattaatggaaaatatgttccacctattaaacgccgagaatggtggaaccttctacgagacaaggtcttagttaaagaagaacctatattcaaaggagacgtctttggtgatctaccaaaggtaaataccgcgtcatggaaactcactggcacgatgggtctcggtggtgctcaaccgcatgtaaacgctagaatgagcaaaaaagaatcactaattttagactgtttaaaacgctgtgaggacaatctatggttaacctatgaggatctggtcggtggatgtgcagatttggttttaatgctagaatctatgccgggtggaggcaaattgattgaatctgtattaaatatgctgcatgttcgaatcacgcaagcgcataacgctttaagctacttgcatgtcagatatgattttaaagaactagccacacacagagacacactctacacaaataaatgttggcaattactgttaaaacaaggatataatccttggcaagcaggacactggctatgttgtgtcttgagcagaaaagccggaaaacaaaacacagtaaacttttttggtccggctagtaccggtaaaactaatatggcaaaagcaatcgtcaacgccgtcaagctgtatggctgtgtcaatcaccaaaatagaaactttattttcaacgactgcgcggccaaactaattgtatggtgggaagaatgtttaatgcatacagactgggtagagcaagccaaatgtatcttgggaggcactgaatttagaattgaccgaaaacacaaggaatctcatttactgcctcaaactcctgtcatcatctctaccaacaataacatatatcaagcgacaggaggcaactgcatcactcacgtacacgaggctccactaagagagcgtgtagtccaatttaattttatgaaaagactcgaaactacattcggggaaataaatccaaaagaaatagctgaatggttggccgtatgcaccgctcgctttgaaatctcgctagccgcttttcacgcgacgtggaaactagacaaaactccaaacgactttccgctgaatcaattctgtcctggtcattcgcaggatctgactctctacgagaccggaacgtgcaacagctgtggaggattctatccgctagaatttcacgaccgcggggacatcgaagaccctgtcgcaggtacgagtcacgatttactcttgactccaaactctaaagctattgtacaagattttgacctaaatctcttaaaaactccaacagcgacaccaagtacctcgaggcgagacgagtctgacgatccggacgagccgagaaagaaggtacggaaaacaaaacactgcaaaaaaacactctttagtgacgactggtgttctcaaccgcgagacgatgtcgagtggagaatcatcgaaacgtcttctcgaaaaacgccgtcgcccgaggtcgctggaccggtctccgagtccgattccggacaagcgagttcgctggagctcgacctctcaccgagcgagtggggagaaatgctcggactcatcgccggaaacatcgaagaaggagaaccaccaatcacgctccactgcttcgagtcactgtctgacgatgacacattttgttaaaaaaattgaaaaacatccgcgcgcgttaaaacctgtaaaatcaaataaaacaactcctatagatgtatttatgcgccatagggccaaagaacaggacgtctgtccgccgttctgtggcttttattggcatagtactagattagctcgaatgggtactgattatatatttaacatagctaaaggacaatttcaagaaataagtaaaaacaatgtaatctcatgggatcaatgtagagacatgttatttgattttaaaaaaatgttagattttagatacggatccatgttatggcactttgccatgggggaaaattgtgataaatgtacttattgggacaaagtgtactctgctcacctggctcatatcgctctacctacacaggaagaggactctgaccctgtaactgacgctgaaatgctggcggttgccaagggggttgatggcaccaaccaatagacgtcctggcggttggaccgttcctggctttaaatatcttggtccatttaatcctctcaataacggtgaacctataaacgaagtagataaagtagctcaaacacacgatagagcatatcaagcctatattgactctggcgtcaatccatatcttaactttaataaagctgactctgatttcattgactcgttgtcttctgactcgtctgtggcgggctggcttggcaagtcagcgtttaaactcaagaggttattggcgccacatcttacaaaagaaaaagagactgcgaacaaaggatcgggagcgggcggaaaacgacctagactcgatccggtacgcgcgcaaaaaagaaaatactactttgccagacaaaaccagggtaaaaactcaaaacaacaaaaaatggaaaatgaagtggaaacggctggagatggacaagagggggcgcctgcgagcgattctcgcgctggtggcagtgggaatggtgggactggtatgggtggcggtggtcatggggtgggtataagtacaggaggatggaaagcaggaaccatgttctctgacacaaaaatcatcaccacctcaacacgacaattttacgcaccaatatacaatgaacacttatacaaaaaagttgtaggggacaaaaattggataggaatcacaacaccatgggcatattttaactttaatgaatatgactcacactttacaccaaacgactggcagcgtctcacgaacgaatatgccaaatggagacccgtaagaatgcatgtaaaaatatataatcttcaaatcaaacaaaaagtcacattaggttcagatacattatataataacgatctcactgccggtgttcacattttttgtgacgggtctcatcaattcccatactcacaagcgccttgggatcacggaaccatgccagaattaccatatgacacatggaaactgccacaatatgcctactttcaattccaagccgacatcacatacgtcgacactagttcattagaagcagatagtgtcaaaaaaaacatggcgagagctggtccattttttatcttagaatctgcaactcacgaagttctgagaacaggagaagaaacagaatttaatttttcattcgaaagcggatgggtggataatactcgagcctatgtcttaccacaagccgacattaatccaatggtacagacaagacgatactttccaacatttgacagacaaagcagcactagattctcttactctagatactcaccatacaacaaaccaagcaattggatgccaggtcccagtataggatacattggaaatacacaaccaatagggaccggcagtgcttggaaagcaagaggaccaatcactgtctgtgctcatccatattttacagctccagaaggtagttcagggacaaccaatgacaatcaatcaaacacggcattaccatcagtcgatggaatgcaaaaatcaggtcacgatgtaacacccgcaaacggggcttgcagtagactagactccatagatcttgcctacgattcatcagaatacagcgcagatcaacaaaggttaattactagaaacatagacagtgatctagcaagatggggctccgtctgggcacaagatggccataatgttgaaattaatgcaaatggtaccactggggccgcaagaacaaatgtctcacaattaaaaaatgtatggatgtatccaaatcaagcatgggacacaacaccaattggtagaaacaatccaatatgggataaaattccaaacacagacagacacaccatgctagactcaggagacggaacactacccatggcacatcctcctggtaccattttcataaaagtagccaaagttccagtcccaacagaaaataatacaaattcatatttagacttatacgttaccggtcaggtcacatgcaccattgaatgggaatgtaaacgattctccacaaaaaattggcgtccggaaatgcgaacaacgcctgcggcgttcgcagatccactattgtacacagtcgacacaaacggggtctacaatacaccagaagtatttacagaagccatgcccacaaaaattggaatcaacaaagtgctgtaatgtttatgattcaaataaaggtagtcataaaatgatcacgtggtgtaatgattcttttttggcgcgaagcaaaactacagttgatctctattctcttaatggacctacacctactctgacacgtcagtgtattgga

SEQ ID NO: 238 - DNA, 5331 bp, Feline bocavirus
  source 1..5331: mol_type = genomic DNA; note = Feline bocavirus / Bocaparvovirus carnivoran 3 - NC_017823
cctggcgcgatgacgtgtcagtgagggtgttgtctaaagactatagggatcaatgataggttcagccatgtaatgattaactgacctttaacgtgattggttgggagttaatgattaacatgtgacctttacagtgattggttctctgaacctataaaaagagctgcatttccgtgtctgtgtcattctgcttccggcgctcgacgagatcggacctggagaagaacaagttccgtcaattggtgagtcgccatcaatggctgaattcgatacagcaagtctcgacgacttcatccaatttgcagacccagcatatacatacgtgctgcgtcttccattacctacaggggaaaattatgagagccagctacagaatgtattatgcgctcgataccccgatttattatccgatccggcattgttcgcaacaatgcctggacctgaatctccaggcgctcagactgattttttggagcgttttggtcctagccgctgctttggggctgaagtctgctatgcggcgcatatggcagcctttaactwctttagtaggaaacagggaaargcgccrcctatygccagcatctacacacaatgcgaattaggccagagaaacattcawtgtcatctagtcatggccggcgacggtctgtctcgtttctcggctaaragcgctgcctacatactaggccaaaaatttgcagacaatctgatttctatcatcgaaaataatctaagaaarggcgacgtmagyaatccagcttttgctaccgcttttatcaragaaatacaagargctcaaagaaaatgcgaaccaggcaacgctggcgacctttgtactgtgwtgcaatataaaagtagaggaggcggcatgtacgcgtgccgaatcgatggccgcgagtacatctgtaactacctattatgcaagaacctgaaatgggtatcttgcgtggaaccagacaaggcgactcctcttaaagccttctttccaatcgcttcaaaaacatatgcatttactctaattaatggaaagattgttccgtatcacgtacgtcgtgaatggtggaatcaactacgagacaaggtcctagtcagggacgaaccaatctttaagggagacgtgtttggagatcttccaaaggtaaatgctgcgtcatggaaattaactggtaatatgggtcaaggtacatctcagccgcatgtgaatgccagaatgagtaaaaaagaatcattaatactagactgtcttaaacgttgcgaggataatctatggctaacctatgaagatctggtcggtggttgtgccgatttaattttaatgttggaatcgatgccaggtggaagtaaattaattgagtctgtacttaacatgttgcatgttagaatcactcaaactcatagtgcgttgtcctatttgcatgtgagatatgacatgaaagaactggcgactcacgcagactcgctccacgctaataaagcatggagattactactaaaacaaggatataatcctctacaagtgggacattggatctgctgtgtcctacataaaaaagcaggaaaacaaaatacattaaatttctttggaccggctagcaccggtaaaacaaatctggcaaaagcaatcgtgaatgcaatcaagctctatggttgcgtcaatcaccaaaacaaaaattttatctttaacgattgtgccgcaaaactagttgtctggtgggaagaatgtctcatgcattcagactgggtcgagcaagctaaatgtatcttgggcggcacggagtttagaattgacagaaaacacagagaatcgcatctattgccacaaactcctgtaatcatctcaacgaataacaatatatatcaaacactgggtggcaactcggtctcacatgtacatgaagctcctctaagagaaagagtcgtccagtttaatttcatgacacgtctagaaagcacctttggagagattgaaccaagagaagtagccgaatggctatccatctgtctctctcggtttgacatctctctggttggctttcatactcaatggaagctaaataaaactccaaatgactttccattggctaaattctgcggtggtcactcacaggatctcgtgttacatgagaccggaacgtgtatgagctgtggcggatactatcctctagaactacacgatcgaggcgacatcgaggacgctacaccaggtacgagctactcaactctattacaattaacacctaaatctgaaaaatacatacaagaatttaacttggatctcttgaaatctccaatagcggccacgagcactcctgtgactcgacaggatccacctgagcttcctccaaaaaagaaggtacgcaaagaaaaacactgcgcacgcgctctctttactgacgactggtgctctcaacctcgagacgatgtcgagtggcgcgtcgtccaagaacgagcagaagcggcggcggccgaggtctctggatcgagatccgagtccgattccggacaagcgagctcgatggagctcgacctctcaccagaacaatggggagagatgctcggactcatctccggggacatcgaagcgggagaaccgccgatcacactccactgctttgaatccatcaccgaagctgacttactttgtcaaacggactcagaaaccgaataaacaaacacctcttgatgtctttatgaaacatagagccaaagaggggggagatgtacctccattttgtgggttttactggcatagtactagattagcaagatttggaacagatgcaatctttaatttgtataaacctaaatttcaagaaatgtcaaaaaacaatgtaattacgtgggatcaatgtcgtgatttgttgtttgattttaaaaagaacctagactataaatacagatctatgatgtggcattttagcatgggtgaacaatgtcataaatgtaattactgggataaaatgtacgctgggcatctggctaatgtatctctatctacacaggaagaggactctgaccctgtaactgacgctgaaatgctggcggttgccatggaggttgatggcaccgaccaataggcgtcctggcggttggactctgcccggtttcagatatcttggtccatttaatccattgaataacggtaaaccagtaaacgaagtagataaagttgctcaaaagcacgataaagcttacgattcttatatcaaggctggcgtcaatccatatttgcactttaataaagctgactctgatttcattgattcgctgtctactgattcgtctgttgccgggtggctgggaaaatcggcgtttaaactcaagagacttttggcgccacatctttcaaaagaaaaagaagcagcgggtaataaaggaggaactggtggaaaacgcgccaagcttgatccggtacgggctcaaaaaagaaaatattattttgcccgtcaaaaccagggaaaaaatcctaaacaacaaaaaatggaaaatgaagttgagacggctggggatggacaagagggggcgccagctggcactgctcgtgctggtggtggtggtaacggtgctggtatgggtggtggtggccatggtgtcggtgtaagcacgggagggtggagagctggaactatcttttctgataatgttataattacaacatcaactagacaatggtatgttccaatatataatggtcatctgtacaaagaaatattcgcaaatgggagcgtaagagaatgggtaggaataagtaccccttggggatactttaatttcaatgaatacgatgctcactttacaccaaacgattggcaacgactcacaaacgagtatgccaaatggagaccaaaaagaatgcatgtcaagatatacaatctccaaattaaacaaaaggtgacactgggggtggacaccctatataacaacgaccttacggcgggtgtacacattttttgtgacggttctcatcaattcccatactcacaaaaaccttgggattttggaacaatgccagaattgccatatgatgtatggaagcttccacaatacgggtattttcaatttcaaaatgatctctcagatcaatcatcaaactcgcttgcagcagataatgtagaaaaaaatattgtgagaaatgctccattttttgtattagaatctgcatctcacgaggtcctcagaacaggagaagaaacagaattcaactttgaatttgaatgtgggtgggtcacaaatacacgtgcatatgctccgcctcaggcagacttcaatccattagttgaaactagacgttattatccaacatacgacaactcatctagcactaaatttgtatacgctagatattcaccatataacaaacctagtaactggatgcccggtccgagtattggatatataggaaacacaacaaccggctcaaactaccaaacaagagggccaatcacagtatgcccacatccatattttactacacctggaaatttagaaacagacagggcatatgacccacaaagtggaacaaatacattaaccgaagctggcatgagaaaatcgggatacgatgtaacacctgtaaatggtgcctgctcccgactggactctgttgacttggcatatgattcgtctgaatatagcttaaatcaaacaaaattaatttcaagaaacatagatagtgacatggctagatggggttcagtgtgggcacaggatggattgaataaagaaataggagacaatggacaaccaaacaacacagacagaaaaaatatcagccagctaaaaaacatatggatgtatccaaaccaggcatgggacacaacaccaatagcaagaaacacacccatatgggacaaagttccagacacagacagaaacactatgctagattcggctgatggcacactaccgatgccacatccacctggtactatctttgtaaaagttgcaaaaataccaataccaaccgaaaacaatgcagatgcatatttagatctatatgtaacaggacaagtaacatgtacaatagaatgggaagtagcaagattcaagaccaaaaactggagaccggaaatcagaacatctgcaacaatgttttcagacccaaaaatatactctgtcaatgccagtggtgtatacaatacaccagaaaccttcacagaatctatgccaacaaaatggggaatcaacaaagttctgtaaaaataaaattacatcattcatcaaactgtacgtgtcacgtgagttttcttttgcgcgccaaaaaatctttcgttgatctctatactcttatacaacaccctccacactgctacgtcagtgtgtatgaga

SEQ ID NO: 239 - DNA, 5106 bp, Goose parvovirus
  source 1..5106: mol_type = genomic DNA; note = Goose parvovirus / Dependoparvovirus anseriform 1 - NC_001701
ctcattggagggttcgttcgttcgaaccagccaatcaggggagggggaagtgacgcaagttccggtcacatgcttccggtgacgcacatccggtgacgtagttccggtcacgtgcttcctgtcacgtgtttccggtcacgtgacttccggtcatgtgacttccggtgacgtgtttccggctgttaggttgaccacgcgcatgccgcgcggtcagcccaatagttaagccggaaacacgtcaccggaagtcacatgaccggaagtcacgtgaccggaaacacgtgacaggaagcacgtgaccggaactacgtcaccggatgtgcgtcaccggaagcatgtgaccggaacttgcgtcacttccccctcccctgattggctggttcgaacgaacgaaccctccaatgagactcaaggacaagaggatattttgcgcgccaggaagtgacgtgcaatgccaccctatataagccaggaaacttccggtttagttcattcgttactctgctctcagagagaacggacctcaggtcggagagatggcactttctaggcctcttcagatttcttctgataaattctatgaagttattattagattatcatcggatattgatcaagatgtccccggtctgtctcttaactttgtagaatggctttctaccggagtttgggagcccacgggcatctggaacatggagcatgtgaatctaccgatggtgaccttggcagagaagatcaagaacattttcatacaaagatggaatcagttcaaccaggacgaaacggacttcttctttcaactggaagaaggcagtgagtacattcatcttcattgctgtattgcccagggcaatgtacggtcttttgttctcgggagatatatgtctcagataaaagactctatcataagagatgtatatgaagggaaacaaatcaagatccccgattggtttgctattactaaaaccaagaggggaggacagaataagaccgtgactgcagcatacatactgcattaccttattcctaaaaagcaacctgaactgcaatgggcctttaccaatatgcctttattcactgctgctgctctttgtctgcaaaagcggcaagaattgctggatgcatttcaagaaagtgatttggctgcccctttacctgatcctcaagcatcaactgtggcaccgcttatttccaacagagcggcaaagaactatagcaaccttgttgattggctcattgaaatggggataacatctgagaagcaatggctcactgagaaccgagagagctacagaagctttcaagcaacttcttcaaataatagacaagtgaaagctgcactggaaaatgcccgtgctgaaatgttattgacaaagactgcaactgattacctgataggaaaagaccctgtcctggatataactaagaatagggtctatcaaattctgaaaatgaataactacaaccctcaatacataggaagtatcctgtgcggctgggtgaagagagagttcaacaaaagaaacgccatatggctctacggacctgccaccaccgggaagaccaacattgcagaagctattgcccatgctgtacccttctatggctgtgttaactggactaatgagaactttccttttaatgattgtgttgataaaatgctgatttggtgggaggagggaaaaatgactaataaggttgttgaatctgcaaaagcaattttgggagggtctgctgtccgggtagaccagaaatgtaaaggatctgtttgtattgaacctactcctgtaattattactagtaatactgatatgtgtatgattgttgatggcaactctactacaatggaacatagaataccattagaggagcgtatgtttcaaattgtcctatcacataaattggagccttcttttggaaaaatttctaaaaaagaagtcagagaatttttcaaatgggccaatgacaatctagttcctgttgtgtctgagttcaaagtccgaactaatgaacaaaccaacttgccagagcccgttcctgaacgagcgaacgagccggaggagcctcctaagatctgggctcctcctactagggaggagttagaagagcttttaagagccagcccagaattgttctcatcagtcgctccaattcctgtgactcctcagaactcccctgagcctaagagaagcaggaacaattaccaggtacgctgcgctttgcatacttatgacaattctatggatgtatttgaatgtatggaatgtgagaaagcaaactttcctgaatttcaacctctgggagaaaattattgtgatgaacatgggtggtatgattgtgctatatgtaaagagttgaaaaatgaacttgcagaaattgagcatgtgtttgagcttgatgatgctgaaaatgaacaataaagatgactcaaagcagatatgtctacttttttagattcttttgaagagtggtatgagactgcagccgcctcgtggcggaatctgaaagctggagcccctcagccaaaaccaaaccagcagtctcagtctgtgtctccagacagagaacccgaacgaaaagataataatcggggctttgtacttcctggctataagtatcttgggcctggtaacggcctggataaaggcccacctgtcaataaggcggacagcgtcgcgcttgaacacgacaaggcctatgaccagcagcttaaagcgggagacaacccatatataaaattcaatcacgctgaccaggactttatagatagcctccaagacgaccagtcattcggaggtaatcttggaaaggctgtatttcaggccaaaaaacgtatcttagagccatttggcctagtagaagatcctgtcaacacggcacctgcaaaaaaaaatacagggaagcttactgaccattacccggtagttaagaagcctaaacttaccgaggaagtcagtgcgggaggtggtagcagtgccgtacaagacggaggagccaccgcggagggcaccgaacctgtggcagcatctgaaatggcagagggaggaggcggagctatgggcgactcttcagggggtgccgatggagtgggtaatgcctcgggaaattggcattgcgattcccaatggatgggaaacacagtcatcacaaagaccaccagaacctgggtcctgccaagctacaacaaccacatctacaaagcaattaccagcggaacctctcaagatgcaaatgtccagtatgcaggatacagtaccccctgggggtactttgatttcaaccgcttccactgccacttctcccctagagactggcagagacttatcaacaaccattggggaatcagacccaagtctcttaaattcaagatcttcaatgtccaagtcaaagaagtcacaacgcaggatcagacaaagaccattgcaaacaatctcacctcaacaattcaagtctttacggatgatgagcatcaactcccgtatgtcctgggctcggctacggaaggcaccatgccgccgttcccgtcggatgtctatgccctgccgcagtacgggtactgcacaatgcacaccaaccagaatggagcacggttcaatgaccgtagtgcattctactgcttagagtacttccctagtcagatgctaagaacaggcaacaactttgagttcacatttgactttgaagaagttcctttccatagcatgttcgctcattcacaggacttagacaggctgatgaaccccctagtggatcaatacctctggaatttcaatgaggtagacagcagcagaaatgctcaatttaaaaaggctgtgaaaggggcttatggcaccatgggccgcaattggctgccaggacctaaattcctggatcaaagagttagggcctacacaggaggaacagacaactatgcaaactggaacatctggagtaatgggaacaaggtgaatttgaaagacagacagtatctcctacaacccggacctgtgtcagctacttacacagaaggggaggcttccagccttccagctcaaaatattttagggatagctaaagatccatacagatcaggcagcactacagcaggaataagtgacattatggtcacggaagaacaagaagtagcacctacaaatggagtagggtggaaaccatatggtaggactgtaacgaatgaacaaaacactactacagctcctacaagttcagatctggatgttcttggagctttaccaggaatggtttggcagaacagggatatatatctgcagggacctattggggcaaaaataccgaagactgatggtaaattccatccttctccgaatctcggaggatttggcctgcacaatccaccaccgcaggtgttcatcaagaatacaccagtgcctgcagaccctccagtagaatacgtgcaccagaagtggaattcctacataacccagtactctacgggccagtgtacagtagagatggtgtgggagctgagaaaagagaattcaaagagatggaacccagaaatccagttcaccagtaatttcagtaacagaacaagcataatgtttgcacctaatgaaactggtggatatgtagaagatagattgattggaaccagatatctaactcaaaatctgtaaattctgtgtaaaaattcaaataaagcacttcctggcgcgcaaaatatcctcttgtccttgagtctcattggagggttcgttcgttcgaaccagccaatcaggggagggggaagtgacgcaagttccggtcacatgcttccggtgacgcacatccggtgacgtagttccggtcacgtgcttcctgtcacgtgtttccggtcacgtgacttccggtcatgtgacttccggtgacgtgtttccggcttaactattgggctgaccgcgcgcatgcgcgtggtcaacctaacagccggaaacacgtcaccggaagtcacatgaccggaagtcacgtgaccggaaacacgtgacaggaagcacgtgaccggaactacgtcaccggatgtgcgtcaccggaagcatgtgaccggaacttgcgtcacttccccctcccctgattggctggttcgaacgaacgaaccctccaatgaga

SEQ ID NO: 240 - DNA, 5132 bp, Muscovy duck parvovirus
  source 1..5132: mol_type = genomic DNA; note = Muscovy duck parvovirus / Dependoparvovirus anseriform 1 - NC_006147
ctcattggagggttcgttcgttcgaaccagccaatcaggggaggggggaagtgacgtaagttccggtcacgtgcttccggtcacgtgcttccggtcatgtgacttccggtcatgtgacttccggtgacgtgtctcctgtcacgtgacttccggtgacgcacttcctttgatgacgtatttccggttgtcaaggctgatcgggcgcatgcgcccgatctgccatgaaaattaaaccggaaatacgtcatcaaaggaagtgcgtcaccggaagtcacgtgacaggagacacgtcaccggaagtcacatgaccggaagtcacatgaccggaagcacgtgaccggaagcacgtgaccggaacttacgtcacttcccccctcccctgattggctggttcgaacgaacgaaccctccaatgagactcaaggacagcaggactttttgcgcgccaggaaatggtgcaatctaggagagtgtataaggagagctttttccggttgcattcattcgttgctctgctctcacagagaacggacctcaggtcaggaaaatggcattttctaggcctcttcagatttcttctgacaaattctatgaagttatcatcaggctaccctcggatattgatcaagatgtgcctggtttgtctcttaactttgtagaatggctttctacgggggtctgggagcccaccggaatatggaatatggagcatgtgaatctccccatggttactctggcagacaaaatcaagaacattttcatccagagatggaaccaattcaatcaggacgaaacggatttcttctttcaattggaagaaggcagtgagtacatccatctgcattgctgtattgcccaggggaatgtccgatcttttgttctggggagatacatgtctcaaattaaagactcaattctgagagatgtgtatgaagggaaacaggtaaaaatcccggattggttttctataactaaaaccaaacggggagggcaaaataagaccgtgactgctgcttatattctgcattacctgattcctaaaaaacaaccggaattacaatgggcttttaccaatatgccccttttcactgctgctgctttatgcctccaaaagaggcaagagttactggatgcttttcaggaaagtgagatgaatgctgtagtgcaggaggatcaagcttcaactgcagctccccttatttccaacagagcagcaaagaactatagcaatctggttgattggctcattgagatgggtatcacctctgaaaaacagtggctaactgaaaataaagagagctaccggagctttcaggctacatcttcaaacaacagacaagtaaaagcagcacttgaaaatgcccgagcagaaatgctactaacaaaaactgccacagactatttgattggaaaagacccagttctggacattactaaaaatcggatctatcaaattctgaagttgaataactataaccctcaatatgtagggagcgtcctatgcggatgggtgaaaagagaattcaacaaaagaaatgccatatggctctacggacctgcgaccaccggaaagaccaacatagccgaggctattgcccatgctgtacccttctatggctgtgttaactggactaatgagaacttcccatttaatgactgcgttgataaaatgcttatatggtgggaggagggaaaaatgaccaataaagtagtggaatccgcaaaagcgatactgggggggtctgctgtacgagttgatcaaaagtgtaaggggtctgtttgtattgaacctactcctgtaataattaccagtaatactgatatgtgcatgattgtggatggaaattctactacaatggaacacagaattcctttggaggaaagaatgttccagattgttctttcccataagctggaaggaaattttggaaaaatttcaaaaaaggaggtaaaagagtttttcaaatgggccaatgataatcttgttccagtagtttctgagttcaaagtccctacgaatgaacaaaccaaacttactgagcccgttcctgaacgagcgaatgagccttccgagcctcctaagatatgggctccacctactagggaggagctagaggagatattaagagcgagccctgagctctttgcttcagttgctcctctgccttccagtccggacacatctcctaagagaaagaaaacccgtggggagtatcaggtacgctgtgctatgcacagtttagataactctatgaatgtttttgaatgcctggagtgtgaaagagctaattttcctgaatttcagagtctgggtgaaaacttttgtaatcaacatgggtggtatgattgtgcattctgtaatgaactgaaagatgacatgaatgaaattgaacatgtttttgctattgatgatatggagaatgaacaataaaggtgattcaaaatagctatgtctacttttttagagaaatttgaagactggtatgagactgcagccgcatcttggcggcatttgaaagctggagcccccaagccaaaatcaaaccagcaatctcagtctgtgtctacagacagaaaaccccaacgaaaagacaataataggggctttgtacttcctggctataagtatgttgggcctggtaacggccttgataaagggccacctgtcaataaagcggacagcgtcgcgcttgagcacgataaagcgtacgaccagcagctcaaggcaggagacaacccctatataaaatttaagcacgcagatcaagaatttatagataatctgcaaggtgatacctcctttggaggcaacctcggaaaagccgtattccaagctaaaaaaagaattctagagcctttaggcctagtagaagaacctgtaaacatggctcctgctaaaaagagtagtggaaaactaacagatcacgaccctatagtaaagaagcctaaattatctgaagaaaactctccttcacctagtaatagtggaggagaagcaagtgcagctgccaccgaaggctccgaacctgtggcagcacctaacatggcagagggaggaagcggagctatgggcgactctgcagggggtgccgatggagtgggtaatgcctcaggaaattggcattgcgattcccaatggctgggagacacagtcattaccaagactacaagaacctgggtcctgccaagctacaacaaccacatgtaccaagccatcacaagcggaacaaacccagactcaaatacccaatatgctggatacagcaccccctgggggtactttgatttcaacagattccactgccatttctctccaagagactggcagagactcatcaacaaccattgggggattagaccgaaagcactcaaattcaagatattcaatgtgcaagttaaagaagtcacgacgcaagaccagacaaagactattgctaacaaccttacctctacaatccagatattcacggataatgaacaccagctgccctatgttctgggctcggccacggaggggacgatgccaccgttcccctcagatgtgtatgccttgccccagtacggctactgcacaatgcacaccaaccagagtggagcgagattcaatgacagaagtgccttctattgcttagagtacttccccagtcagatgctgagaacagggaataattttgaattcagttttgagtttgaagaagttcccttccatagcatgttcgctcattcacaggatttagacaggctaatgaatcctctcctagatcagtacctgtggaatttctctgaggttaatggtggcaggaatgcacagttcaaaaaagctgtgaaaggagcatttggtgcaatggggagaaattggcttccaggacccaaacttctagaccaaagggtaagagcatacagtggaggaacagataactatgcgaactggtcaatctggagtaaaggaaacaaagtttttcttaaagacagagagtatctcctgcaaccaggtccagtagctactacacatacagaagatcaggcttccagtgtaccggctcaaaacataataggaattgcaaaagacccctacaggtcaggcagtactctggcaggaatttcagacatcatggtaacagatgagcaagaaatagcaccaactaacggtgtagggtggagaccttatggattgaccgtaaccaatgaacaaaacacaacaacagctcctacaaatgctgagctagaagtactgggagcactacctggcatggtctggcagaacagagatatttacctgcagggtcctatatgggctaaaatacccaaaacagatgggaaaccccatccttctccaaacctgggaggttttggtctccataatccacctccccaggtctttattaaaaatactcctgttcctgcagatcctccactagagtatgtaaatcagaagtggaattcttacattacacagtattcaacagggcagtgtactgtagaaatggtctgggaactcagaaaagaaaactccaagagatggaaccctgagatccaatttaccagtaactttggaaatagaacaagtactatgtttgctccaaatgagactggaggctatgtagaagataggctgattggtaccaggtatttgactcagaatctgtaaatttctgtattcttttgattttaaataaaccatttcctggcgcgcaaaaagtcctgctgtccttgagtctcattggagggttcgttcgttcgaaccagccaatcaggggaggggggaagtgacgtaagttccggtcacgtgcttccggtcacgtgcttccggtcatgtgacttccggtcatgtgacttccggtgacgtgtctcctgtcacgtgacttccggtgacgcacttcctttgatgacgtatttccggttgtcaaggctgatcgggcgcatgcgcccgatctgccatgaaaattaaaccggaaatacgtcatcaaaggaagtgcgtcaccggaagtcacgtgacaggagacacgtcaccggaagtcacatgaccggaagtcacatgaccggaagcacgtgaccggaagcacgtgaccggaacttacgtcacttcccccctcccctgattggctggttcgaacgaacgaaccctccaatga

SEQ ID NO: 241 - DNA, 4441 bp, Gray fox amdovirus
  source 1..4441: mol_type = genomic DNA; note = Gray fox amdovirus / Amdoparvovirus carnivoran 2 - NC_038533
acttctcattggttgaaagttatccgtcatttctggtggaatgaggaagtaacagagtatataagcaaaggttactgcaatcagagcacacttgagctaccaaagcaacatggctcaggctcagatcgctgaacagaaaattctgcaggcactgtttgaacaactgaaaaaggagattgctgacggtgaaggactcgcttggctgtttcaacagaaagcttacacggacggagacaacaaaccaaccaaagaaacaccaccgctgagaacaacatccgaagacctaaggttagtgttcgattctattgaagagaatataaaaagtaacactgactgtttaagtaataatgaaattaacttttgcaaactaaccttagggaagactttggttagtttagacaagcatataaaatcacacagatggaacgccaataacctacaatttatttggcaagtggaaaaaggaaaaacaaaacatcttcatattcactgtttggttggttactctgacagcacagctgacaaaaaagacatatcaaaatcacttagttggttcataaaaaaaattaacaaagaactagcaaccatctggagtaaccatcattgtactttacaagatattaaaagacctgaagacagacaacaaaacctaaatgtctggttacaagatggcataacaaagccatacaaatactttaacaaacaaaccagacaagagtacaacaagcaagtaaacttgcgtgaatatacactgatttatctttttgacaaaaacaagataactgaaaaaggtatggatggttactttgctgctggaaatggaggttttatagacaacatgactgaaaaagaaagaaaaataatgagaaaaatgtacttagatgaacaatgctcagacatggcggatgattcacaggactgggacgatagccaagaaccgccaaaaacagaaccgccaaaagtaacgactgaaacaatttcaaatgttacttatgttgattcagctgttgtgcaaccaggaacctcaactatttgggcttcctgttccaccaaagcaaccaaaccaaagactattactgaaacagcaaagcaaccatctaaaaaattaaccactgctaaaagcacattagacagcctatttgatattggttgctttactccagaagacatgattttaaaactaagtgatacatacttagaactaagcttagaagcaaatggaacaaataaaatcttgactttacttcacatgaaccaagttaaaacagcaagcatactaaatgcctttgaatgcataatgaaatttaatgatgatgaagatgaaaaaccattaatcaacatcatcaaccaaatgggcctaaatgaaaaagtgttaaagaacataatagcaaccgtactaaccaaacaaagtggaaaaagaggttgcatttggttctacggaccaggaggaactggaaaaacattacttgcaaacctcatatgtacagcagtaaagaactttggtatggttactactagcaatcaaaactttccatggacagactgtggaaaccgaaacatgatttggttagaagaatgcggcaacctaggtaacttcattgaagactttaaagctattactggaggaggagacattaaagtagatacaaaaaacaaacaaccacaagcaatcaaaggagtcacagtaataacaagcaacaaagatataaccaaagtaaccataggagctgtagaaactaatgtacacagtgaaccattaaaacaaagaatagttaaaataagatgtgtcaaaacaatcaacccaactacaaaaataacaccaggaatgttaaaaaaatggctaagtacatgggaaggaaaaccaatccaattaaaccatgaaatggaaaatctctatcgaagtaagtaaagtaaggtaagtaaaaaatttacaaaccaacttcaaacttaacaaccactaacaaggttactttactttacaggagagactactggagcaaactatcctgtgacgagtgcggagaagaatactggtttcttacaaccttctactgcagaaagtgcaggtggtgcaaacacaacaaagtccgacacacaaagaaaggttgtggacagtgcaccgctgaaagcagcaaagagacctcggcatgagtaaaagtaagcaacctaacataacaacagtaacatcactttactttactttactttggttaacctaacgttactttactttagttcctcagcactatcctgggaaaaagagaagtgctccacgacacgtgtttatccagcaagcaaaaaagaagaagcagcacagcaacccagcagtttcacatcaagaagacacaatagaagaaatggactcaaacgaaactgaacaaatggacatttcagagcaacaacaggttgctgaacatggtggtggggtaggtaagagtactgggggatttaacaacacaacagaatttaaggttactaacaatgaagttattataacttgcaatgccactagagtagttcacattaaccaagcttcaactgatgaatacttaatttttaatgcaggtagagaaatagataaaacaccaaagggatcgctaaacttagaattttttatgtttgatgactttcaccaacaagtaatgacaccatggtttttggtagacagcaacgcctggggtgtttggatgagtccaaaagactttcagcagatgaaagtattatgcagtgagattgagttggttagtttagaacaagaaattgacaatgttgttattaaaacagtaacagaaactactcagggaggtacatcagtaatacaatataacaatgatcttactgcatcactacaagtcgcactagacaccaacaacattctaccatacactccagctgcacctttacaagaaacactaggctttgttccatggagagcaaccaaaccaacacaatacagatattaccatccaagctacatatacaacagatatcctaatattcaaaaaaaatcacaagagcaaagtacatacacagctatacaggatgattactttagtgtagaccaagactacttcaactttattaccattgaaaacaacataccaatagaaattctaagaacaggagacaactttcacacaggcagatacgaattcaaaagtaaaccatgcaaactaaccatgagctatcaaagcacacgttgccttggtttacctccactttgcaaacctaaaacagacacaaagttagtaacatcactagaaaatggaggggaaatggactgttatgtagaaggacaacaacacactagaaagggtcacttttggggtgaagaaaaagcagaaaaaaacactgagatcaacagagtgagaccatacaacataggctatcagtttcctgaatggattgttcctgcgggtcttcagggtagttactttactggaggtcccagacaatggagtgacacaaccaagggtgcaggaacacactcccaaacagtacaacaaaactttagcaccagatatgtatttgacagaaaccacggtggtgataaccaagttgacaccatagactcaataccaatacaggaaagaggcaagtactattcagaacaagaactacagcaagcaaccacactaacagcaaccaacaaagcacaaacaggtaaaaaatgggagtcttgggaggaggaaggatggccggctgcatcaggaacacactttgaggatgaggtactttactttgattactttaactttagtggtgaaacaacaaaaaactttccacaagaggttctttcagacggtttacaaatgaaaaagctactcaatgcataccaaccaacagtaggacaagatgatgttggtcctgtctatccatggggacagatatgggacaagaaacctgacatggatcacaaaccaagcatgaactacaatgcaccatttgtttgtaaaaacaatcctccgggacaactattagttaaactaacagagaaccttacagacaaatttaactatgatgaagatccagacagaataaagacttatggttactttacttggagaggcaaactaactctaagaggaaagctaggacaaacatcatgttggaaccctgtaaaaagagaaagaataggagaaccaggagtctttagtaaatcaaactatcacaaacagatacctaacaacagaggcaactttgaaataggaatacaatatggaagaagcactgtaaaatatctctactaatgtaaccattgtaaccatgttactttacttaaataaatgttacataaaaagtgaataaccaaaaccaatgtgtacttcctcattgaaccagaagtgatggataaaataaacctatattcattactaatcaacatccactaaagtaaagtattatgctttgatatactttactttgctttgattcactgatg

SEQ ID NO: 242 - DNA, 5196 bp, Human bocavirus 2c PK
  source 1..5196: mol_type = genomic DNA; note = Human bocavirus 2c PK / Bocaparvovirus primate 2 - NC_012042
ggagtggctacgtatggggtgatcataaacacgcccaggaagtgacgtatgtcaaccaatcagcatcgagcatatatcctatataagccgatgcactyccgcatctcgtcagactgcatccggtctccggcgagtgaacatctctgggaagagctccacgcacgtggtgagtgacactatggccttttctgctcctgtaattagagctttttctcaacctgcttttacttatgttgttaaatttccatatgaaaactggaaagaggaagagcacttactatggagcttacttgctcctgggactgaacgtctcatgattcaactaagaaactgcgcaccacatcctgaagatgatcctgtcagggaagatattttatgctcactagcagatcaacactatggtgctatttttgctaaagcttgctacatagctacaactacactaatggggcagaaacagagaacaccttttccacgctgcgacattatatgccaatctgaaattggttcagaacatctacattgtcacatacttgttggaggagccggtctcagcaaaagaaatgctaaaatttcacgtgctacacttctgggtcttgtgatggctgaactaacacaacgctgcaaacagcttcttgcgcttcgtccatttgaaccagctgaggctaatatttttcatctcctcaagcgcattgaacgcgaagcatggtcagggcatactggtaactgggttcaaattcttcaatacaaagataagcgaggtgatcttcacgctcaaccaattgatcctttacgctttttaaagcattacatactaccaaaaaatcgattgatttctccttccagcaaacctgacgtctgcactactccagataactggttcattctagctgacaaaacatacgctcacactattattaatgggcttccgctgctagaacataacagaaaagcctatctacaagagttagaaagtgaagtcatcccggggccttctaccatggcctttgggggacgtggtgcgtgggaacaacttcctgaggtaggagaacaacgcttaattacttctaatgcttctactgcttataaagctaacaaaaaagaaaaattaatgctaaatttacttgataaatgtgatgaacttaatttacttgtttatgaagacttagttagtgcttgtcctgaccttttacttatgcttgaaggtcagccaggtggtgcacgcctaattgaacaggtgcttggcatgcatcatattaaggtgtgtgctaaatacactgcattaacatttttatttcatttacatccggatcaattattaacttctaacaataaagctttaaaactactgttgattcaagggtacaacccacttcaagtagggcatgccatctgttgtgtacttaacaaacagatgggcaagcagaacactatctgcttttatggtcctgcttcaacaggcaaaacaaactttgcaaaagcaatagttcaaggtgttcgcctttatggctgtgttaatcatttaaacaaagggtttgtctttaacgattgcagacaacgccttataatttggtgggaagagtgtttaatgcaccaagattgggtggaacctgctaaatgcattttaggcggaactgaatgtagaattgatgttaaacataaagacagtgttcttcttcaacaaacaccagtaattatttccactaaccatgacatctactctgtagttggtggcaatactgtttctcatgttcatgcagcaccattaaaagagcgagtccttcagctaaatttcatgaaacaactgccacaaacatttggagaaatttctccagttgaaattgcagaactattgcaatggtgctttaatgagtacgaatgtactcttactggctttaaacaaaaatggaacttagataaagttccaaactcatttcctcttggagacctttgtcctacacattcacaggactacacgcttcacgaaaacggattctgcactgactgtggcggctatcttcctcatagtgctgacgattttgtctacactgacgtggctagcgaaacaacaagcggagactgcgacccaggtaggctttaatacatttgcttaattaaattatatatttgcactttgcttatgtattaactcctacaggtaacctgggggatacggacggagaggactccaagtcagaggcatcggaagtggactttcgtccatccaagaagaggcgtgtgatttcagcaactccaccaagcagtccagtaagtggtccaagcctttctacctttttagatacttggcagtcacaacctagggacgaagatgagctccgaatctatgaagaacaagcatcgcaactccaaaagaacaccaagtccactccagaaagagaggaggcgcaactgggagagccacaagagccgcagccggagcccgatccgacggcatggggagaaaaacttggagtatgctcatcacagcaaccaggagaaccgccagtcgtcttatactgctttgaagacctcagaccaagcgacgaagacgaaggagaaaacatcgggggggaatagaaccaatccttatactgtattcagtcaacacagggctaatcattcagatgctcctggatggtgtgggttttactggcattctactagacttgctagagatgggactaattgtatctttaatgaaatgaaacaagaatttcaagaattacaaataaatggaaaaattacttgggacaatgctagagaactattgtttagtcagaaaaaaaagctagatcaaaaatacagaaacatgctgtatcatttcagacacagtcctgattgtcctagatgtgattattgggataatgtataccgtagacacttagctcatgtctcttcacaggaatcagaggaggttacagacgaagaaatgctttctgctgttgaaagcatggatacaaatgcctccaattaaacgccagcctggagggtgggtgcttcctggttataaataccttggtccattcaatcctcttgaaaacggtgaaccagttaataaagctgatcgtgctgctcaagctcatgataaatcatattctgaaataataaaaagtggaaaaaatccttacttgtatttcaataaagctgatgaaaaattcattgacgatttgaaaaacgactggtctcttggtggcattattggctcaagtttctttaaacttaagcgcgccgtggctcctgctctaggaaataaagagcgagctcaaaaaagacatttttactttgcaaactcaaataaaggtgctaaaaaaccaaaaaataacgagcctaaaccaggcacatcaaaaatgtctgaaaatgaaatccaagaccaacaaccatctggctccatggaggagcgaggaggcggaggaggtgcggtcggtagtgtgggaggggggaaaggttctagtgtgggtatatccacaggcggctgggttggaggcagctactttactgactcatatgtcataacaaagaacactagacagttcttagttaaaatacaaaatgaccacaaatacagaacagagaatataattccaagcaacgcaggaggaaaatcccagcgatgcgtaagcacaccttggtcatactttaacttcaatcaatacagcagtcacttctcaccacaagactggcagcatttaacaaatgaatataaacgctttaagcctagaaaaatgcatgtaaaaatttacaacttacaaataaaacaaatactctcaaatggtgctgacactacatacaacaacgacctaacagctggtgttcacatcttttgtgatggtgaacacgcatatccaaatgcaacacatccatgggatgaagatgtcatgccagaacttccatatgaaacatggtatttgtttcaatatggatacattccagttattcatgaactggctgaaatggaagacgcaaatgctgtagaaaaagctatagcactacaaataccctttttcatgcttgaaaacagcgaccatgaagtgttaagaacaggagaaagcacagaattcacttttgactttgactgtgaatggataaacaacgaaagagcatacattcctcctggattaatgtttaatccaaaagttcctacaagaagagctcaatacatcagacagcacggaaacacagcatccagcaacaccagaattcaaccatatgcaaaacctacaagctggatgacaggaccaggtctactcagcgcacaaagagtaggaccagctggctcagacactgcatcatggatggttgttgtcaatccagacggagctgcagttaactcaggaatggcaggagttggttcaggatttgatcctccttcaggatctctaagaccaactgacttagaatacaaaatacaatggtaccaaactcctgcaggtaccaacagtgatggaaacatcatttcaaatccaccactatccatgctcagagatcaagctctctacagaggaaatcaaacaacctacaacctatgctcagatgtgtggatgttcccaaatcaaatttgggacagatatccaataaccagagaaaatccaatctggtgtaaaaaaccaagatcagacaaaaacacaataattgatcctttcgatggaacacttgcaatggatcatccgccaggaacaatcttcataaaaatggcaaaaattccagttccttcaaacaacaacgcagactcatacctaaacatctactgcactggacaagtcagctgcgaaattgtctgggaagttgaaagatacgcaacaaagaactggagaccagaaagaagacacaccgcacttggtcttggaattggaggagaagaaaacgtaaatccaacttatcatgtagacaaaaatggaaaatacattcaaccaacaacttgggacatgtgctatcctatcaaaacaaacatcaataaagtgttgtaatctcttaagcctgttcattgcttatgcttataagttcctctccaatggacaagaggaaagaaaagggtgactgtaatcccgagctcatgagttcgaggctacagtccgatggcagtggtgttgccgtctcgaacctagccggtacacccttgtgcattgtgggaggagctgttttgcttacgcaatcgcgaaattttatatatttaatgtagtgttgtactgcgtcaggcat

SEQ ID NO: 243 - DNA, 5104 bp, Human bocavirus 4 NI
  source 1..5104: mol_type = genomic DNA; note = Human bocavirus 4 NI / Bocaparvovirus primate 2 - NC_012729
ggtgatcataaacacgcccaggaagtgacgtatgacagccaatcagcattgagcatatagcctatataaaccgatgcacttccgcatctcgtcagactgcatccggtctccggcgagtgaacatctctggaaagagctccacgcttgtggtgagtgacactatggccttttctgctcctgtacttagagctttttctcaacctacttttacctatgttattaaatttccatataataactggaaagaagatgaacacttactatggagcttacttgctcctgggactgaaagtctcatgattcaactaaaaaactgcgcaccacatcctgaagatgatcctatcagggaagatattttatgctcactagcagatctacactatggtgctgtttttgccaaagcttgctacatagctacatctacactaatggggcagaaacaaagaacactctttccacgctgcgacattgtttgccagtctgaaattggctcagactttctacactgtcacatacttgttggaggagccggtcttagcaagagaaatgctaaaatttcacgcgctacacttttgggtcttgtgatggctgaactaacacaacgctgcaagctacttcttgcacatcgtccatttgaaccagctgaagctactatctatcatgaacttaaacgcattgaacgcgaagcatggtcagggcatactggtaactgggttcagattcttcaatacaaagataaacgaggtgatcttcacgctcaaccaattgatcccttacgctttctaaaacattacattctaccaaaaaatcgattgatttctccttccagcaaacctgacgtctgcacttctccagataactggtttattctagctgacaaaacatactctcacactattattaatgggcttccgctgctagaacgtaacagaaaagcctatctacaagagttagaaagtgaagtcatcccggggccttctgccatggcctttgggggacgtggtgcgtgggaacaacttcctgaggtaggagaacaacgcctaattacttctaatacttctactgcttataaagctaacaaaaaagaaaaattaatgttaaatttacttgataaatgtgatgaacttaatttgcttgtatatgaagacttagttagtgcttgtcctgaccttttactaatgcttgaaggacaaccgggtggagcacgactaattgaacaggtgcttggcatgcaccatattaaagtatgtgctaaacatactgccttatcttttttatttcacttacatcctgatcaattattaacttctagcaataaagcactaaaactactattgattcaaggatacaacccattacaagtagggcatgccatctgttgtgtacttaacaaacagatgggcaagcagaacactatttgcttttatggccctgcttcaacaggcaaaacaaactttgcaaaagctatagttcagggcgttcgcctttatggctgtgttaatcatttaaacaaggggtttgtttttaacgattgcagacaacgccttataatttggtgggaagaatgtttaatgcatcaagattgggtagaacctgctaaatgtattttaggcggaactgaatgtagaattgatgttaaacataaagatagtgttctccttcaacaaacaccagtaatcatttccactaaccatgacatctactctgtagttggtggcaatactgtttctcatgttcatgcagcaccattaaaagaacgagttcttcagctaaattttatgaaacaactaccacaaacatttggagaaatctctccaagtgaaattgcagaacttttgcaatggtgctttaatgagtacgactgtactcttgctggctttaaacaaaaatggaacttagacaaagttccaaactcatttcctattggagacctttgtcctacacattcacaggacttcacgcttcacgaaaacggattctgctctgactgtggcggctatcttcctcatagcgctgacgattctgtttacactgacgtggctagtgaaacaaccagcggtgactacgacccaggtaggctttaatacattagctttactatttattactcttgaagtttgcttatgtattaactcctacaggtaacctgggggatacggacggagaggactccaagtcagaagcatcggaagtggattattgtccacccaagaaaaggcgtgtgatttcagcaactccaccaaacagtccagtaagtggtccaagcctttctacctttttagatacttggcaatcacaacctagagacgacgatgagctcagaatctacgaagaacaggcatcgcagttccaaaagaacaccaagtccacttcagaaagagaggaagcgcaactgggagaatcgcaagagccgcagccggagcccgatccgacggcatggggagaaaaacttggagtatgctcatcacaacaaccaggacaaccgccaatcgtcctatactgcttcgaagacctcagaccaagcgatgaagacgaaggagaaaacatcgggggggactagaacaaatccttatactgtattcagtcaacacagggctaatcattcaaatgctcctggctggtgtgggttttactggcattcaactaggcttgctagaaatggcactaataatatttttaatgaaatgaaacaaaaatttcaagaactacaaatagatgggaaaatcagttgggatactactagagaactattgtttactcagaaaaaaacattagatcaaggctacagaaacatgttgtaccactttagacacagtcctgattgtcctagatgtgattattgggatgatgtttaccgtaaacacttagctaatgtctcttcacaggaatcagaggaggttacagacgaagaaatgctttctgctgttgaaagcatggaaacaaatgcctccaattaaacgccaacctggagggtgggtgcttcctggttataaataccttggtccatttaatcctcttgaaaacggtgaaccagttaataaagctgatcgtgctgctcaagctcatgataaatcatattctgaactaataaaaagtggaaaaaatccttacttatatttcaataaagctgatgaaaaattcattgacgatttgaaagacgattggtctcttggtggcattattggctcaagtttttttaaacttaaacgcgccgtggctcctgctctaggaaataaagagcgagctcaaaaaagacatttctactttgcaaactcaaataaaggtgctaaaaaaacaaaaaacaacgaacctaagccaggcacttcaaaaatgtctgaaaatgaaattcaagaccaacaaccatcagattctatggatggacaacgagggggcggaggaggtgcaactggcagtgtgggaggggggaaaggttctggtgtgggtatatccacaggcggatgggtaggaggcagctattttactgactcatatgttataacaaaaaacaccagacaatttctagttaaaatacaaaacaaccatcaatacaaaacagaattaatatcgccttccacatctcaaggaaaatcacaaagatgcgtcagcacgccttggtcttactttaactttaatcaatacagcagtcatttttcaccacaagactggcagcgattaacaaacgaatataaaagattcagacccaaaggcatgcatgttaaaatatacaatttacaaataaaacaaattctttcaaatggtgctgacactacatacaacaacgacctcacagctggtgttcacattttttgtgatggcgaacacgcatatccaaatgcaacacatccttgggatgaagacgttatgccagagctgccataccaaacatggtatttgtttcaatatggatatattccagttatacatgaacttgctgaaatggaagactcaaatgctgtagaaaaagcaatttgcttacaaataccattttttatgcttgaaaacagcgaccacgaagttttaagaacaggtgaaagcacagaatttactttcaactttgactgtgaatggataaacaatgaaagagcatacattcctccaggcttaatgtttaatccactagtacctactagaagagcacagtacataagaagaaacaacaatcctcaaactgctgaaagcacatccagaattgctccatatgcaaaacctacaagttggatgactggaccaggtttactcagtgcacaaagagtaggtccagctacttcagacacaggagcctggatggttgcagttaaaccagaaaacgcaagcattgacacaggaatgtctggaattggaagtggatttgatccaccacaaggatcactagcaccaacaaatctagaatacaaaatccaatggtaccaaacaccacaaggaacaaacaacaatggaaacatcatatctaatcaaccactatctatgctaagagatcaagctttatttagaggaaatcaaacaacctataacctatgttcagatgtatggatgtttccaaatcaaatttgggacagatacccaataaccagagaaaatccaatatggtgtaaaaaacccagatcagacaaacacacaacaattgatccttttgatggatcccttgcaatggatcatcctccaggcacaatttttattaaaatggcaaaaattccagttccttcaaacaacaatgcagactcatacttaaacatttactgcacagggcaagtcagctgtgaaattgtctgggaagttgaaagatatgcaacaaagaactggagaccagaaagaagacacacaacatttggtcttggaattggaggagctgacaacttaaatccaacctaccatgttgacaaaaacggaacttacattcaaccaacaacatgggacatgtgctttccagttaaaacaaacatcaataaagtgttgtaaccttctaagcctcttttttgcttatgcttataagttcctctccaatggacaagtggaaagaaaagggtgactgtaatcccgagctcatgagttcgaggctacagtccgatggcagtggtgttgccgtctcgaacctagccgttacacc

SEQ ID NO: 244 - DNA, 5028 bp, Human erythrovirus V9
  source 1..5028: mol_type = genomic DNA; note = Human erythrovirus V9 - NC_004295
gacgtcacaggaaatgacgtaactgtccgccatcttgtaccggaagtcccgcctaccggcggcgaccggcggcatctgatttggtgtcttctttttgaaattttggcgggctttttcccgccttatgcaaataagcggccatgtttaatgttatattttaatttaattggacaaacgcctaacggttactaggggcggagttacgggcggtatataagcagctgcgttccctgacactttcttttctggttgcttttgactggaactcacttgctgttctttgcctgctaagtaacaggtatttatactaacttttaatttactaacatggagctatttcggggtgtcttgcacatttcctctaacattctggactgtgctaatgataactggtggtgctctatgctagacttagatacttctgactgggaaccactaacccattctaacagattaatggcaatatatttaagcagtgttgcttctaaacttgattttactggggggccgctagcaggttgcttatacttttttcaggtggaatgtaacaaatttgaggaaggctatcatatccatgtagttattggtggtccaggactaaatgctagaaacttaactgtgtgcgtagaaggtttatttaataatgttctttaccatcttgtaactgaaagtgttaaacttaaatttttgccagggatgactaccaaaggaaaatattttagagatggagagcagtttatagaaaattacttaatgaaaaaaattcctttaaatgttgtgtggtgtgtaacaaatattgacgggtatatagacacctgtatttccgcctcttttcggcgaggagcttgtcatgctaaaagaccccgcattactgcaaatacagacagtgctactaatgaaactggggagtctagctgtggagggggagatgttgtgccattcgctggaaagggaacaaaagcggggttaaagtttcaaaccatggtaaattggctatgtgaaaacagagtatttactgaagataaatggaaattagtggattttaaccaatatactttattaagtagcagtcacagtggcagctttcaaattcaaagtgccttaaagttagctatttataaagctactaacttagtacccactagtacattcttgttacattcagactttgagcaggttacttgcattaaagaaaataaaatagtaaaattattattgtgtcaaaactatgatcctcttttagtgggtcaacatgtgttaaggtggattgacaaaaaatgtggtaaaaaaaacaccctgtggttttacgggccaccaagtactggaaaaacaaatttggcaatggctattgctaaaactgtaccagtgtatggaatggtgaattggaataatgaaaactttccatttaatgatgtagcggggaaaagtttggtggtctgggatgaaggcattattaagtccactattgtggaagctgcaaaagccattttaggtggtcagccaaccagggtagatcagaaaatgcgtggcagtgtggcagtgcccggtgtgcctgtggttataaccagcaatggtgacattacatttgttgtgagtggtaataccactacaactgtgcatgctaaagccttaaaggaacggatggtaaagctaaactttaccataagatgtagccctgacatgggtttacttacagaggctgatgtacaacaatggctaacttggtgtaatgcacaaagctggagccactatgaaaactgggcaataaactacacatttgatttccctggaataaatgcagatgccctccacccagatctccaaaccacccccattgtcccagacaccagtatcagcagcagtggtggtgaaagctctgaagaactcagtgaaagcagctttttcaacctcatcactccaggcgcctggaacagtgaaaccccgcgctctagtacgcccgtccccgggaccagttcaggagaatcatttgtcggaagcccagtttcctccgaagtggtagccgcgtcgtgggaggaagctttttacacgccgcttgccgatcagtttcgtgaactgttagtaggggttgactttgtatgggatggtgtgaggggattgcctgtttgctgtgtggaacatataaacaacagtgggggagggttggggctttgccctcattgtattaatgtgggagcttggtataatggatggaaatttagagagtttactccagacttagtgcgctgcagttgtcatgtaggagcctctaacccattttctgtgttaacttgtaaaaaatgtgcttacctgtctggattacaaagttttgtagattatgagtaaaaccactaacaaatggtgggaaagcagtgacaaatttgcccaggacgtgtataagcagtttgtgcaattttatgaaaaagctactggaacagacttagagcttattcaaattttaaaagaccattacaacatttctttagataatcctttagaaaacccctcttctttatttgacttagttgctcgcattaaaagtaatcttaaaaactctccagacctatatagtcatcattttcagagccatggacagttatctgaccacccccatgccttatcatccagtaacagtagtgcagaacctagaggagaaaatgcagtattatctagtgaagacttacacaagcctgggcaagttagcatacaattacccggtactaactatgttgggcctggcaatgagctacaagctgggcctccgcagaatgctgtggacagtgctgcaaggattcatgactttaggtatagccaattggctaagttgggaataaatccttatacacattggacggtagcagatgaagaattgttaaaaaatataaaaaatgaaacagggtttcaagcacaagcagtaaaagattactttactttaaaaggtgcagctgcccctgtggcccattttcaaggaagtttaccggaagtgcccgcgtacaacgcctcagaaaaataccccagcatgacttcagttaactctgcagaagccagcactggtgcaggcgggggaggtagcaaccctacaaaaagcatgtggagtgaaggggctacatttactgctaattctgtaacgtgtacattctctaggcaatttttaattccatatgatccagagcatcattataaagtgttctctccagcagctagtagctgccacaatgctagtgggaaagaggcaaaagtgtgcactattagtcccattatggggtactctactccgtggagatacttagattttaatgctttaaatttgtttttctcaccattagagtttcagcacttaattgaaaattatggtagtatagctccagatgctttaactgtaactatttcagaaattgctgtaaaagatgtcacagacaaaacaggaggaggtgtgcaagttactgacagcaccacaggacgtttgtgtatgttagtggatcatgagtataaatacccatatgtgctaggtcagggacaagacacactagctccagaactgcccatttgggtttactttcccccccagtatgcttacttaacagtaggtgaagtaaacacacaaggaatttcaggagacagcaaaaaattggctagtgaagaatcagctttttatgtgttagagcacagttcatttgaacttttgggtacagggggatctgccactatgtcctacaaatttccagctgtgcccccagaaaacctagaaggctgcagccaacatttttatgaaatgtacaaccctttgtacggttctcgtttaggggtacctgacacattaggaggggaccctaaatttagatcattgacacacgaagaccacgcaattcagccacaaaactttatgcctgggccactaataaattcagtgtctaccaaagaaggagacaattctaatacaggtgctggaaaagcccttacggggcttagtactggcactagccaaaacaccagaatttccctacgccccgggccagtatctcagccataccatcactgggacactgataaatatgttacaggaataaatgccatttcacatggacaaaccacttatggaaatgctgaggacaaagagtatcagcaaggggtaggaagatttccaaatgaaaaagaacagcttaagcagttacaaggtcttaacatgcacacatacttccctaataaaggaacccaacaatacacagaccaaattgaacgccctcttatggtgggctctgtttggaacagaagagctcttcactatgaaagtcagctgtggagtaaaatccctaacttagatgacagttttaaaactcaatttgcagccctaggcgggtggggtttgcatcaaccaccccctcaaatatttttaaaaatactaccacaaagtgggccaattggaggtattaaatccatgggaattactactttagttcaatatgctgtgggaataatgacagttaccatgacctttaaattgggacctcgaaaggctactggaaggtggaatccccagcctggcgtttatcctcctcatgcagctggtcatttaccatatgtactgtatgaccccacagctacagatgcaaagcaacaccacagacacggatatgaaaagcctgaagaattgtggactgccaaaagccgtgtgcacccattgtaaacattccccaccgtgtcctcagccaggaaccgtcacccaccgcccacctgtgccgcccagattatatgtgccccctccaataccccgtaggcaaccatctataaaagatacagacgctgtagaatataaattattaactagatatgaacaacatgtaattagaatgctaagattatgtaatatgtacacaagtttggaaaaataaaagccttaaataaataattcatagtgtatggttctttaaaaatttcaaaaagaagacaccaaatcagatgccgccggtcgccgccggtaggcgggacttccggtacaagatggcggacagttacgtcatttcctgtgacgtc

SEQ ID NO: 245 - DNA, 5268 bp, Human parvovirus 4 G1
  source 1..5268: mol_type = genomic DNA; note = Human parvovirus 4 G1 / Tetraparvovirus primate 1 - NC_007018
acgaggcctcgtcgcatatgtattacatcaaaaattagccacgcccttccggttccggccacgcccttccggttccggtgacgtgcttccggccacgtcaacttccggccacgtcaacttccggtgacgtatttccgcttccggtcccgcgaaaattacgtatttccgcttccgggacacgtccgcttaaaagcggaagtgacgccctttcccaaccacacctacctcgcctataagaatcagtgtcagttcctctgactcactctgttcgtagaggtcaccatggacgctcctgcctggattgccgtgctacaaattcctactggatttctctccaacccagcaaactggagggattgggatggcctgcaaagaccccgcaatcttctcgccgacgactggcctatacaggagctccgtgagtctgttccattttttgaccatgctgttaatttaggctactgcatattacaacagctgtttgcctcgcatgctgttactctgccatgcagagtgaagcctagcatgtttttgcagttagaaccaagtagtggagaagagaatgaaatgcactaccatttagttgtgaaccaagcagacatggtaggcagagaatgtagcaactggctgcgcacctggaaagtctttatggctggatatttggtagctcctgtgtggactttaagttggaacattagagaaacccgtcaagggcgactatatcaggctgatatgagttttgtgaaaaattacctgctacctaagctaccactgaatgattgctattatgcatggactaatatagacaggtttgaagcagctgtactgagcgtgcgcaacagacagctttcaggtcctcaaggtgctattgccttaccattcactgacgcacctccacggacaccagctgcagaaggagttcctccaactatggcaggaaaaggaacacaaagattcatggatcttattgactggttagttgaaaatggaatagccacagaaaagaggtggttatcagtgaataaactcagctacaggtcctttctaggaagcagtggtggagttcttcaagcaacaaatgcactacaaatagctaaaagagaaatggttttagcccaccctttattaagctacctgacaaagaatgcttctgcttttgaagaaagtaataaagttgcacagctgtttagcttaaatggctacaatcctgttgacgctgcatggtattttgcagcatgggcaagaggagtgtggcccaaaagaagagccatatggctctggggcccagctagtacaggtaaaactctgttagctgctgccatagcaaatcttagtccatcttacggttgtgtgaattggacaaaccaaaatttcccatttaatgactgtcactgtcaaagcttagtgtggtgggaagaaggcagaatgacagagaacattgttgaagtagccaaagctgtgcttggtggagcacctgtgaggttggatgtaaagaacaaaggcagcgaagactacatacctacctgtgtcatcattacctctaatggagatttaacagttacagttgatggccctgtggttagcacccagcatcaagaagctttgcagacaagaataaccatgtttcagtttcagagaatggttccggatggcttagctccacttcctgaagaggaagtgagaagcttttttaagctaggtgaacaggaactgaatatgaaaggcacacctccagaagaatttagagtgccaagaaactttgacaaacaaccaatggcatctaccagcaacttgccaaaagccttgtgtgcaccaatggaagacaaccaagtacaatgggattctgaagatgattggtttccaccacccactcagaagaaaaggcgggaacttcaagagacacctccaaccactcccagtgaagtcattgagctgtcctctccgagtccattagcagacgcgccgccgaggacaccagacagtctgggagaattgtctctaactcctacttctgtaagccagattgtttctgcaccatttcctgacgaaactgctgaaaggtatggagctggggacattgagtctttctggtctgaacatgtgtttgatgcagattgggctacaaggctacacatttgtcccccaggtggtcctaaaccttacggacttttttggacttacttatggtctcgagagttttggaggtttaagcagagtctgagccgttcagaggctcatttgataaatagaagatttatttgggcttggtggtaagtgtgattttatgttttctttgattttcttgtagacttgttcctgacgctgctacaggagcagaagactaacaagcttcatttatttttccaggtaagcaaacatgtctgctgctgatgcttatcgtccaggtggcaagctgcctctagatgagctaatgcaaagaatgaatagagcaattcctgtgggaccggaaccttcaagtcaagccaaccgcggaggggggccatatcaaactcactttgctataggaataatgtactccaaggctttccaaggcttgcttagatttgctaatgctttacctcctgaattgagccctgtaaaacagcttgttaatcagttagaaaattataggcgtaagacatctgataccagggtatggtacagagtgtacttagacatgacaagacttctaatttctgtggctcctccaggagcagcaaacaaactcagacaggcagcagcaggtataactcactcaaaagcccccaatgctgaaagcctgagaggcattgtgcggttcgcagctgctgcttttgtacctactgtagaaaatattgatagattttttgaagactcgctaacgaactttgccaaagaagacttagacacctggcaacaactccacgagcagtttatcaaactctttcaccctccagatgtcggagtccaccttgttagtgacagccgcgatgaaggagctgattcccttgttgaaccagaccttgagcggcctgccggaggcgggcttactctccccgggtataattatgttggtcctggtaatcctctggatagtggtccccctcagggaccagtggatgaggcagcaaaacatcatgatgaacggtacgcagagatgattgagcatggggacatcccttatttacatggtcacggcgctgacagattaatgaacaaagagttagaagaaaaagagcgccggggggacattacacacttagcagatgtagtagttggcaatgctattagaggtttatggcaggctaaggaaactgttggtgatattgctgatgttcaactttctcaggtcctaccgcccgctcctccttcttcggaccaacaaccggcttattccgcaggagagccctcagccaagaaggcgcggattggtacccctgacgagtctgacccggccttgcttctgcagcctcataccaatacaatgtccgtggaaccagctggaggaggaggtggagttaaagttaaagctcagtggataggtggaactagtttttctgattctgtagttattacttcacatactagaacttcaatgttagctgatagaggggggtatgtgcctgtgtataagcaaggaagtcatgtagattcttcgcagcctgtaatgggtatgaaaacaccttattcttacattgatgttaatgctttatctgctcattttactcctagagactttcagcaactgctagatgaatatgatgaaattaaacctaaaagcttaactattgcaatttctgctattgtaattaaggatgttgcaaccaatcaaacaggtactactgtttctgattctgcaagtggtgggattactgtatttgctgatgatagctatgactatccatatgtattaggtcataatcaagatacattaccaggtcatttaccaggagaaaattatgtattgcctcagtatgggtacattacaagaggcagagaaattgatcaacagaacagcattgtagctattagtgatcataagacagaactgttttttttagagcaccatgatgcagagtgtttgggtacaggagatcactggtctcatcactatgagtttccagatgacctaccttggagaaaattgtcaactcccaaccaaacattgtatgcaagacataatccaattccttctagcaggttagctattatgacaggtgttgataatgatgggactgccatttggaaacgccctgaaggcatggatgttggcagactcccattaaattatgttccagggccagctctaatgatgccaacagacacccaaattagaaacacaactttcagagatcctgtggctattggaaatcctgctacaagtgacaggtatagtgtagctcctttagtccatcaaccatggtctgtccgtacagaagaatggctagcaaacaaaacagactatgctgttcataattatttaggaggtgttgcatacactagaagaaagcatgaagagtcttatgataaacatgaggaggaccgagatggtagagttactaacccatccagagttgttcagatagatggtgatttagcagctcctcatgtgggtcacacgttttttgttcctggacacaccagagttacctctggtggtactgatacagtgtacagcccaaaattatatcaggaacctgtgtttcctttgtttcctggtgctgtttggaacccaaatcctttatcatatgattgccaaatatggactaaaattcctaatacagaatgtcatttttttgctcaatatcctcttttgggaggttggggagttcttactcctcctccaatgatttttgtgaagctcaggtcacaaccaggccctcctagtccaggtgctcacacagttccacaatctaatttaaaccagtatgcaatttttcacttgcattatagtatgcagtttttagttaagcgccgcaagagatctcgccgccataatcccgagaaacctgctcctttcccgacaacagattcgggacgtatgccttttacccttgccaatagcttaaaagaccccaatacaccagtgtatgaagtgccttctgatcaatggattgcgcgaaattattctcatttgctgtaataaatttataaaatttcattgctgtgagactgattcttataggcgaggtaggtgtggttgggaaagggcgtcacttccgcttttaagcggacgtgtcccggaagcggaaatacgcaattttcgcgggaccggaagcggaaatacgc

SEQ ID NO: 246 - DNA, 5596 bp, Human parvovirus B19
  source 1..5596: mol_type = genomic DNA; note = Human parvovirus B19 / Erythroparvovirus primate 1 - NC_000883
ccaaatcagatgccgccggtcgccgccggtaggcgggacttccggtacaagatggcggacaattacgtcatttcctgtgacgtcatttcctgtgacgtcacttccggtgggcgggacttccggaattagggttggctctgggccagcttgcttggggttgccttgacactaagacaagcggcgcgccgcttgatcttagtggcacgtcaaccccaagcgctggcccagagccaaccctaattccggaagtcccgcccaccggaagtgacgtcacaggaaatgacgtcacaggaaatgacgtaattgtccgccatcttgtaccggaagtcccgcctaccggcggcgaccggcggcatctgatttggtgtcttcttttaaattttagcgggcttttttcccgccttatgcaaatgggcagccattttaagtgttttactataattttattggtcagttttgtaacggttaaaatgggcggagcgtaggcggggactacagtatatatagcacagcactgccgcagctctttctttctgggctgctttttcctggactttcttgctgttttttgtgagctaactaacaggtatttatactacttgttaatatactaacatggagctatttagaggggtgcttcaagtttcttctaatgttctggactgtgctaacgataactggtggtgctctttactagatttagacacttctgactgggaaccactaactcatactaacagactaatggcaatatacttaagcagtgtggcttctaagcttgaccttaccggggggccactagcagggtgcttgtacttttttcaagcagaatgtaacaaatttgaagaaggctatcatattcatgtggttattggggggccagggttaaaccccagaaacctcacagtgtgtgtagaggggttatttaataatgtactttatcactttgtaactgaaaatgtgaagctaaaatttttgccaggaatgactacaaaaggcaaatactttagagatggagagcagtttatagaaaactatttaatgaaaaaaatacctttaaatgttgtatggtgtgttactaatattgatggatatatagatacctgtatttctgctacttttagaaggggagcttgccatgccaagaaaccccgcattaccacagccataaatgatactagtagcgatgctggggagtctagcggcacaggggcagaggttgtgccatttaatgggaagggaactaaggctagcataaagtttcaaactatggtaaactggttgtgtgaaaacagagtgtttacagaggataagtggaaactagttgactttaaccagtacactttactaagcagtagtcacagtggaagttttcaaattcaaagtgcactaaaactagcaatttataaagcaactaatttagtgcctactagcacatttttattgcatacagactttgagcaggttatgtgtattaaagacaataaaattgttaaattgttactttgtcaaaactatgaccccctattggtggggcagcatgtgttaaagtggattgataaaaaatgtggcaagaaaaatacactgtggttttatgggccgccaagtacaggaaaaacaaacttggcaatggccattgctaaaagtgttccagtatatggcatggttaactggaataatgaaaactttccatttaatgatgtagcaggaaaaagcttggtggtctgggatgaaggtattattaagtctacaattgtagaagctgcaaaagccattttaggcgggcaacccaccagggtagatcaaaaaatgcgtggaagtgtagctgtgcctggagtacctgtggttataaccagcaatggtgacattacttttgttgtaagcgggaacactacaacaactgtacatgctaaagccttaaaagagcgcatggtaaagttaaactttactgtaagatgcagccctgacatggggttactaacagaggctgatgtacaacagtggcttacatggtgtaatgcacaaagctgggaccactatgaaaactgggcaataaactacacttttgatttccctggaattaatgcagatgccctccacccagacctccaaaccaccccaattgtcacagacaccagtatcagcagcagtggtggtgaaagctctgaagaactcagtgaaagcagcttttttaacctcatcaccccaggcgcctggaacactgaaaccccgcgctctagtacgcccatccccgggaccagttcaggagaatcatttgtcggaagcccagtttcctccgaagttgtagctgcatcgtgggaagaagccttctacacacctttggcagaccagtttcgtgaactgttagttggggttgattatgtgtgggacggtgtaaggggtttacctgtgtgttgtgtgcaacatattaacaatagtgggggaggcttgggactttgtccccattgcattaatgtaggggcttggtataatggatggaaatttcgagaatttaccccagatttggtgcgatgtagctgccatgtgggagcttctaatcccttttctgtgctaacctgcaaaaaatgtgcttacctgtctggattgcaaagctttgtagattatgagtaaagaaagtggcaaatggtgggaaagtgatgatgaatttgctaaagctgtgtatcagcaatttgtggaattttatgaaaaggttactggaacagacttagagcttattcaaatattaaaagatcattataatatttctttagataatcccctagaaaacccatcctctctgtttgacttagttgctcgcattaaaaataaccttaaaaattctccagacttatatagtcatcattttcaaagtcatggacagttatctgaccacccccatgccttatcatccagtagcagtcatgcagaacctagaggagaagatgcagtattatctagtgaagacttacacaagcctgggcaagttagcgtacaactacccggtactaactatgttgggcctggcaatgagctacaagctgggcccccgcaaagtgctgttgacagtgctgcaaggattcatgactttaggtatagccaactggctaagttgggaataaatccatatactcattggactgtagcagatgaagagcttttaaaaaatataaaaaatgaaactgggtttcaagcacaagtagtaaaagactactttactttaaaaggtgcagctgcccctgtggcccattttcaaggaagtttgccggaagttcccgcttacaacgcctcagaaaaatacccaagcatgacttcagttaattctgcagaagccagcactggtgcaggaggggggggcagtaatcctgtcaaaagcatgtggagtgagggggccacttttagtgccaactctgtgacttgtacattttctagacagtttttaattccatatgacccagagcaccattataaggtgttttctcccgcagcaagtagctgccacaatgccagtggaaaggaggcaaaggtttgcaccattagtcccataatgggatactcaaccccatggagatatttagattttaatgctttaaacttatttttttcacctttagagtttcagcacttaattgaaaattatggaagtatagctcctgatgctttaactgtaaccatatcagaaattgctgttaaggatgttacagacaaaactggagggggggtgcaggttactgacagcactacagggcgcctatgcatgttagtagaccatgaatacaagtacccatatgtgttagggcaaggtcaagatactttagccccagaacttcctatttgggtatactttccccctcaatatgcttacttaacagtaggagatgttaacacacaaggaatttctggagacagcaaaaaattagcaagtgaagaatcagcattttatgttttggaacacagttcttttcagcttttaggtacaggaggtacagcaactatgtcttataagtttcctccagtgcccccagaaaatttagagggctgcagtcaacacttttatgagatgtacaatcccttatacggatcccgcttaggggttcctgacacattaggaggtgacccaaaatttagatctttaacacatgaagaccatgcaattcagccccaaaacttcatgccagggccactagtaaactcagtgtctacaaaggagggagacagctctaatactggagctgggaaagccttaacaggccttagcacaggtacctctcaaaacactagaatatccttacgcccggggccagtgtctcagccgtaccaccactgggacacagataaatatgtcacaggaataaatgctatttctcatggtcagaccacttatggtaacgctgaagacaaagagtatcagcaaggagtgggtagatttccaaatgaaaaagaacagctaaaacagttacagggtttaaacatgcacacctactttcccaataaaggaacccagcaatatacagatcaaattgagcgccccctaatggtgggttctgtatggaacagaagagcccttcactatgaaagccagctgtggagtaaaattccaaatttagatgacagttttaaaactcagtttgcagccttaggaggatggggtttgcatcagccacctcctcaaatatttttaaaaatattaccacaaagtgggccaattggaggtattaaatcaatgggaattactaccttagttcagtatgccgtgggaattatgacagtaaccatgacatttaaattggggccccgtaaagctacgggacggtggaatcctcaacctggagtatatcccccgcacgcagcaggtcatttaccatatgtactatatgaccctacagctacagatgcaaaacaacaccacagacatggatatgaaaagcctgaagaattgtggacagccaaaagccgtgtgcacccattgtaaacactccccaccgtgccctcagccaggatgcgtaactaaacgcccaccagtaccacccagactgtacctgccccctcctatacctataagacagcctaacacaaaagatatagacaatgtagaatttaagtatttaaccagatatgaacaacatgttattagaatgttaagattgtgtaatatgtatcaaaatttagaaaaataaacgtttgttgtggttaaaaaattatgttgttgcgctttaaaaatttaaaagaagacaccaaatcagatgccgccggtcgccgccggtaggcgggacttccggtacaagatggcggacaattacgtcatttcctgtgacgtcatttcctgtgacgtcacttccggtgggcggaacttccggaattagggttggctctgggccagcgcttggggttgacgtgccactaagatcaagcggcgcgccgcttgtcttagtgtcaaggcaaccccaagcaagctggcccagagccaaccctaattccggaagtcccgcccaccggaagtgacgtcacaggaaatgacgtcacaggaaatgacgtaattgtccgccatcttgtaccggaagtcccgcctaccggcggcgaccggcggcatctgatttgg

SEQ ID NO: 247 - DNA, 5228 bp, Lupine bocavirus
  source 1..5228: mol_type = genomic DNA; note = Lupine bocavirus - NC_040533
cggagccaaccagactatataagacagacaccaggaagcagcatcactcgacggagagcgcatggtgtggtgagtcctgctcatcttccttcgctatacacgggtttcgctgcaagcgggatggctgttcacctgctcagagaggaaaataagcgcgcttggctggacaatattcaggcatacaatgccattagccgcttcgggcatccgagctatacctacgtgctgaaatttcctgatctgcaatacgagggggaacgctggctgacatggaaccaactcatggtgccgttctggtttcctgctcgggggggctacacgcgagagcaatacgatgaattctacgcgcaagcgccatggccgtatgacaaaccagagcacgatgagtttctcatgctgcgagggccggcggcgctcttctatcaagtcctaggagactgcgcgtacaatgcctgtcatcgctggttcaggagcagacagtgcacggcacagccagactttcagtccttcatccaagtggaacgcggcagacacaatctgcacgtccacgtggtcatctcgggcaaagggctcaaccgctggatggccaaactagcggccaccgagctgggggatctctggctgcattcgctcatccaacacgctcaatgcatgaacgcggacggcatccatctcgaggaaccgtggtccgactgcatggacatcctcgaaatggccagggctaggcaggtcagcggcacacaccactactgcgacgtgctcaaatacaaagcacgctcaggacacatgcactcgtgtccggtcaacgcggtagacttcatcaccaactacctactcagaaaaaatctcaaataccacatcttcatgtctgcggaacgcagcactccgaccgaagcctactggccggaagtgggagatgaaaaaacctacactgacaccatcatcaacgggctgtttctacctgcggctaaccgcaaactcttgtacaaacagctgctcagccacgcctgtcaaccacaaaacgaaccacgcttctcgggagtagaaatgtcaacactgccggaggtacgcaaacaaacgtggtcatccacatccggaaccgcagaaggcactaaaatcactcgcaaacaaagctgcatgattgattgcatgcaaagagccttgacaaaccactggctcacctacgaacagctggtactcgggtgtccggatctcgtggtcatgttggagtctcagccgggcggctccaaactagtagaccagatgctccacatggctcacgtcacactctgcaaacaacacacggcactcagctacatctttgcacaacacggcacacctgcactcacaccagacaacatgctcgtgcggctctttaacacacaagggtacaatccgtggcaggcaggacactggctctgtctacacctcagcaaacaggcaggcaaacaaaacaccatcagcttctacggaccggctagcacgggcaaaaccaacatggctaaagccatcgttcaagcagtgggactctacggctgcgtcaatcaccaaaacaagtcctttgtctttaacgactgcgcagccaaactagtcctgtggtgggaagaatgcaccatgacggcagactgggtagaacaggccaagtgcgtcatgggaggcacagaattcagaatagacagaaaacacagggaatctcaactactcatgcaaacaccactcatcgtatccaccaacaacgacatttacacagtcacaggaggcaacacaatcactcacgtacactctaaaccactcaaagaacgcgtagtccagtttaactttatgaaacaactaccgtccacgttcggagaaattggcacacgagacgtggcggctctcttgcacgcatgcgcgacgcgatttgccggcaagctcacgctgcaaggattctacgacacctggaacctcgatcacgtacacaacacatttccgctggctaacctctgtgcctctcattcacaggactgggtgctgcacgacaacgggctgtgcgtgcagtgtggagggtacctaccacttcaacgtcaaccactcgaaccagtcctcgaggacgtctcgtccgaggtcagctcgccaggtaggccggactctcccagcgaatgcgggttctaccatcaactatctctgggtgactcgctgtccttctcctttcaaggatcaaccggacggagcgcgtcggacacggagcccgagtcgccagagcgcaagcgccagcgtgtggaaacacctgaggttccgccggcgtcgccagcatcacaacgcttcgacagcgccatccagcgggtaagcgatgagtacgccacgcaaccagacaacctctgggaccagcaacagtgcgaccggctactggaagaggcactctccaactggtcggagcacatgggcatcgtacacacaccaaagtccaggcaaggaaaagaacctccaatcgtacttcactgcttcgaggacatgccagacctcgaagacagcggagacgagggaaacaaagagaacgcgcagccgcagcaaaagcccaaaactaccactgtctccgagcaaacgtcgccggctcgaccgtgctccggacgagggctcaaaagggcgtacgaacaggaagaagacgccgatgatcctgtacccggaacatcgagcgactcatcctgacgcgcctgcctgctgcggcttctactggcacagcaaccgtctggctcgcaagggcacggactggatctttaacgagggactcactcaattccaatcagtgtgtcgggacggggtcattgtatggcgtgattgccgcgaaattctgttcaaattcaaaaaacaaatcgatcaagattatagaaacatgctgtggcatttcgggagggggggctactgtgaacgctgtacctattgggatgacgtgtatcaacagtacatggctcacactcagtctcacttgtctgatctgcagggatcttctccaataaagtctgatgacatctctgacgctgaattgctagcagcggcagaggcagccatggatggcgccactcaggcctcctaaggggtggacactcaacgggtacaattacttgggtccgtttaaccctctcaataacggtacacctgtcaataaagctgacgcagcagcccaaaaacacgatcaagcctataacgactatctcaaatctgggaaaaatccttacctgtactttaataaagctgatcaaaagttcctagacgacttgcgtggtgattggtccgcagggggcctcgtgggaaaagggttctttggcctcaaaaaggccatcgcaccaacactcaacgagccagaactggccggagacaaaaaggaacgcgcgaccaaacgcaaactctactttgccagaagcaacaaaccatccaaaagcgcaaaaatgagcgctcccgaagcagagggggcaggagacgggccacaagaagaacaggcacagggagagcctgccatcatgtcacgcgccggaggcggcggcggaggcggaggcggcggcatgggaggcggcggctccatcggcatcagcacgggcgggtgggaaggcggagaaatattctcagaccacaccgtcatcaccaccgtcacgcgacaatggtacgtgcccatctacaacgggcaccaatacagaaaactactacaacaaaacccaacaagcacacaaaactacccaataccatggcaaggcatcagcacgccatggggatacttcaacctcaactgctacaacagccactttacaccactaggatggcaacgcctactcaacgaatacaaacgatggagaccaaagcgcatgcgcgtcaagctgtacaatctgcaaatcaaacaggtcgtacaactgggcgcagacacgctctacaacaacgacctcacggcaggcgtacacgtgttttgcgacggctcacaccaatttccatacacacaacatccgtgggacgaacaaacactgccagaactgccaaacgacatctacaaactgccacaatacgcctacttccaaatacaaggagacctcatagacaatccgggtctctcggacacagaacaaacactggtgggcaacatgccgctatacctgctagaaacagcgacgcaccaagtgctacgcacaggagaatccacaggattccaattcgaattcgactcggggtgggtgcacaacgacagaaactacgcaccgccacaagcagactttaatccgctcgtgccaacgcgacggcgtttcccggtgtaccaaaacggagcatggaccacaacaaaatacgatccgtacaaaaaaccaagcaactggatgccaggcccgggaaacccgtggagaggacgaaccaactcggcaaacaatccgcaacaagcaagagggccggtggtcgtaagctacgcaccacaaggagccatcatccaaggaggagaccagcccaacgcaggacagggaccagaacaagtcatcagcgtcgacgacatcgcaaacatgggatggcaagtcaacccggtcaacggagcctgcatgcgaaacgaacaatacacgatgcaatacggaccaaccaatccacaatcaaacaacaacaacaactacgtacacgcgcaaaacgtagacatcgacatgaccagatacgcaagagccacgcgcttctacaacgacaacacaaacaacaacgggctgctgggagaggacatcgtacccatgtggatgtacccaaaccaagcatggaacagctgtccgatatcaagagacaacccgatatgggacaaaatgccaagaacagaacaccacaccatcaaagactccagcgacggaacactcgccatggaacatccgccgggaaccatctacgtcaaagtagcaaagatcccaataccaacagaaacaaacacagactcatacctaaacatatactgcacaggacaaatcaccgtcgaaatagaatgggaagtagaaagataccaaacaaagaactggagaccagaaatcagaacatcatcaaaagactttacagtgcgaagacaatacgacttcgaccaaaacggaaactacctcacaccaatagactttttcaacagcatgcccacaaaatacggggtaaacagggtcaactaacaataaacaatataaaaatcacacacgcgtcagactcttttgtatgactatttatttctaccatcacctaccatctatatacgtcatcacgta

SEQ ID NO: 248 - DNA, 4765 bp, Megabat bufavirus 1
  source 1..4765: mol_type = genomic DNA; note = Megabat bufavirus 1 / Protoparvovirus chiropteran 1 - NC_029797
aatcaaaccgagacaatggctcaagcaagtgtctcagacaagactgatcaaggactatcatggcttaaagaacatgaaaaacacactggactatcatttgtactaggcataccagacctagtcttcacagcaaaagaagaaaccatcaaagtaacctggaaagactacacaagatcacctgcaaacaaagacatatttgacgttcaaagactggatgaagcaacagtgagtactcgcgaccgggacttagactggtatttagagacaaaacatactcctctaaaacaagccatcaatgctactgcagtaactaaaaaaattctatttgatctatgcaaagaaaaaagcattgaaccaaaagaaattcactggttcatacaatctgaagttggtaaagacaaaggcctacatatacatctagtaatatactctgacaaaataccaactggatctggcaaatggattcaaaaatacctaaaccaaaaatggggcctacatttacttgacatcttaggcctagatccaatttacaaaactatcttcactgaccaaacaaaattcagacaaaaatgtgaagatgaaagatgggtgcaactactactatacagacacccacaaactaaaaaagaatatgtaaaaccagtcttcttaggagatatagtaggctactactttctaagaaaatctcctgtcaaagcaactggtgaacttggttactgctacagcactgatagtggattctggagcaactctctaagccacaaagtaagactaactatagcagaaatgtataaaaaattcaaagaaactcaaaaagaactagaactatcaattgaaactggaccatctccacaagaaaaaaaacaaaaaagaatggccagtcaaaaagaaatcagcatcaaagaaaccatagatgacctagtaaaaaatagactccatacagttgaaaaatggatgctaggtaatccagacacctacattgctcaaattgcagcaccagggggcgagcaaatcataaaaaacatacttgacatagtgactctaaaaatgtctgttgaatatacagcacttgatttaatcattaactctggaaaaactcaaaagaaaaaagcaaaaaaaaccaaagcatggaaactaatcaaagacaacaacatgaatccatacaaagtattccatgcaatcatgtgctgtctcaacaaacaaatgggcaaaagaaacaccattctactgtgtgggcctgcaagcactggcaaaagcctaatagcacaaaaaatatgccaactggttggtaatgttggttgctacaatgcctcaaatgtaaactttcctttcaatgactgcagcaacaaaaatataatctgggtagaagaagctggcaactttggaggccaagtaaaccaattcaaaacaatcatgagtggccaatcaatcagacttgaccaaaaaggaaaaggcagtaaagaaatccaaccaactccagtcataatgactacaaatgaagacataaccaaagtaatgataggatgtgaactcaaaccagaacacaaacaacctataatggacagatgtgtaagaatagaactcaaaaaaagactacaaggtgactttggtttgcttgaagatggtgaaatcccagacatattcaaatggttaattaagaaaggatatgaaccaacaatgcaaagttactgtgaaaaatggggagccactcccacatggggtgaaaactggaatacaaaacctaaagaaaacacagaagaagaagcagaacaatctgaccaagaaaccaacaacagcgctcctaaacgaagcctggctgaagctcttgatccagagcaaaaaaacccagaatttcaagagttaatgcaagcaattgcaactcaaaactgggaagacagtcaagacttcatggaaggagtcgctgctgatgccagtgattggtagagaaagaagaggtaagtgaaactaacacctagcttaacctcaaaaccacttcctatgcaaacctaactaactaactttcatttctaacttcactctgctacagccatggccacgctagctcaggcctctcctgtgctaattggatttataattatggttctgcttctgctcttcatgctctacattttctgcaacggaatgtggaacttccacagaaatactaacctactacatccagctcaaggaaggccaacaagaactttaatcatggctttcctaccaactctaaccagctttgcagtctgctgcctaatctggggcatttatctaagagtaatcttagatccagccttcaatccaaaagaaagtgactgcataaaacaaggctacaacttgactgtaacctgcatgcttggtaatggcagcatctttaactgtatctctcactgttaacaggttgggtacctcctggttacaactatctaggaccaggcaacaccaacttcaaaaaacaaccaaccaatccatctgacaaagcagcaagaaaccatgacttggaatacaacaaaatcttaaaagaaggacaaaatccatacatctacttcaaccacgcagacgaggacttcatcaaagcaactgaccaagcaagtgactggggaggaaaatttggaaacttcattttcagagcaaaaaaatcacttgcacctgaactggctccagcaaaaaaaaaagcaaaaaccaacgcaaccaaaccaaccaacaacatcaaaagaggtaggcctgctcctttttatctctttgtaaatagagctagagaagccaaaaaacaaaaactaatgagtgacaatggcacagatgaaccagaccaacctgctgcaactgaaacagcagctagaggatctggagcatcaggtggtggtggaggaggcggtgttgggcacagtactggtagctattctaatcgtactaactttatttatgagggtgatacagtacacatcatatgtaatgctaccaggcaaatccacctcaatatggccagcactgaggaatacaaaatctatgaaacagaacacggatcagaatttccaactgatccatctaaagactcaggaagaggaacttaccaagactcataccatgcaaaagtagagacaccatggagactaatccatgcaaacgcatggggctgctggttctcaccagcagactggcaacaagtactaaccacatgcagagacctagaaatagtctcatttgaacaaagcatagaaaacatagtcatcaaaactgttgccactcaaggaacaggaatagaagaaaccaaaacttacaacaatgacctaactgccttactagaagttgctcaagacaacagcaacattctaccatgggtctcagacaacatgtacatggactcaataggttatgtgccatggagagcatgtagaataccagaatactgctaccatgttgactttactaacacaattgacctaggaggccaagcaggctggccacaagcacaagctccaggcaaaacactgcaaagactacaacaaatcaactggagaaacatccaattcatcacagtagaaaatactgtagacattgaaatgctcagaacaggggacgcctggaacagtggcaaataccactttccaaaagtcaaaccagcatcactagaatatcactggcaaagcacaagacacacaggcgctccacatccaaccacatcaccaaaccaagaaggacaaaaagcagctattgtagatccaggctgtgcttggcaatggggagaccacacatcagctaaccaatctgcctctactcaagtcaaaaactttcatattggatatggctggcctgaatggcaattccactatggcacaggaggacctagtgtcaacccaggtccaccatacagccaaactccatggggcagaccatatgactctcaaacaccaagactaactgcaggtgccagtgacaaagcaatctttgactaccaacacggagaagaccacaaccaagaaagagacacttggtgggacattaatgctaaaatgacaggacaaatgaactgggctccacaaaacatgcacatcaaagaacttaaaactggagtaccaagtgctgacagtgcatggtttgactcctaccacaacaccttcggaccattcacagcagtagatgacaaaggaccagtctatccatggggagcaatctggggaaaacaaccaaacacgactcacaaaccaatgatgagtgctcatgctccatatctaatccatggaccaccaggacaactacttgttaaaatagcacagaacctaactgaccaatacatcaacacaggaagcaactacccaagaatccaaacctacgctacactatggtggaaaggacaactcaaattcaaagccaaactaagaacaccaagacaatggaactgctacaacctaccaggaataccagaaggacaaccaatgagtaaatatgtaccaaatgcaattggtcagtttgaaattccttacatgccaggaagatctcttccaaacttcacaatatgattaaccaacttactggactcttttgcttaatcagtatactcattagcttaagtttagaaatacactgtctaattagtttagtgttactaataatatgtaaaagcctaaacctaatatagttgcttgcttaaacccggctctggcctagctttcaatgacacttagtcaccaaaaaaatcaataaaagttttaaaatgacaacaagcctcttttctattgggataccaactggttttgcggtaaaggtg

SEQ ID NO: 249 - DNA, 4822 bp, Miniopterus schreibersii bat bocavirus
  source 1..4822: mol_type = genomic DNA; note = Miniopterus schreibersii bat bocavirus / Bocaparvovirus chiropteran 4 - NC_039048
ctgctctgagctctcgccggtgcaggtaagcctgagatggccgctgtgcttgaatctgctgatttgtctgctctcgctagctatgttcagggcttccactctccggcttacacctatgtgttcaagctgccgtttttgggctctgttcagagctgggagcgcgatctgcagtggggactgtgctctcataaccgagaagggctggatgacgttagcggttggctgctggctcctgagcaggatagcccgtcggcgcagcgcctgtacctgcaggctcacggcgaggaccgctactacgggcgttcgctggctatgtttgtctacaatgctgcaatccgctattttcgatctcgccaggccgtgagcgagcctagctgctccatctacgtgcagtctgaaattggggaggctcagtttaatatccatctggtaatgggtggtcctgggctgaacaagtacaacgccaaggcggcggtacgcccgctgcagctgcactttttgaccgagctgggcgatcagcttcagtgtaatacccgggactgggtgcctcaagaccgcatcgatgtgcatctgctggtttctagagtgcaagcggcgctgactcgcaccatcaccgaggaagactatcgggtggtggacattctcacgtatcgcacccgcgctgggcaatctcacgcggctagagtgaacgggtgggagtacatagtcaactatctgctgtgcaagaacgcgcagttttttgcggaggcgtcgccgcgccgcaacactttggcttgcgattggttcgagggaatctacaaaacctatcagtctactctgatcaacggggagtctgtgccgctggggtcgaggaagaggctgtggaaccagctgcaggcgggtctgggggtgctgaaagcggagcctgtcttttctggcgagatgtttggggcgctgcctgaggtgagaccggccgggtggaaggaacctgaaaaggcggggggccgtcagcggttgaaccggcgggaagcgctgatgctggactgtttggcgcgctgccgtcaggacaacctcttaacctacgagcagttggtgggcgggcatcctgacctggtggttatgctggaggcgattggtggaggcggaaagcttatcgagcaaatctttaccatgttccatatcgagttagtcaaaaagcatacgcccttgtcttatttgcaaacgctgaatcaccagtccagagtccaaccgggcaacaaggtctttattcttctcggtctccaaggttacaacccttggatggtgggtcactgggtgttggctctgtttaaccggcgggcggggaaacaaaatactctgctactctatgggccggccagcacgggcaagactaatctggctaaggctttagtaagcgccgtgcggctctacggctgcgtcaatcaccaaaacaaatcgtttatctttaacgactgcgctcacaagctggtggtctggtgggaggaatgcctgatgcacactgactgggtggaacaggccaagtgtattctgggtgggaccgaattccgaattgatcgcaagcacaaagagtcgcagctgctgccgcagactccggttatcattagttccaataacgacatttaccgggtggtgggtggcaacaccgttagcgaggttcactctaagccgctgagggagcgcgtggtgcagctcaactttatgaagagactgcattccacttttggcgagattactctcacggaaatctacgcctggatcaatagctgcgccgatcgctttgatccttcgctcgaggggtttctcaagcagtggaagctagaccgggtcaagaatacctttcctctgaatacgccttgttccggttgttcacagaactttgaagtgcaccaaaacaccggattttgcctaatctgtggcggcgtgccggagttggagacccgggatcgcggtcaacccgagtccgtcggtgagtctggcgttccgggggcggctctcatgttatgtctccgcgtctctaacgttgtgtctctacagctacgcagtgcgacctcgacgcggagcccgaggagccgccggccaaacggttgtgcgtggacgaggacgtggaggaggatcctctgccaggtctgcaaaacgatgtcttcttgggggtccaggaagaggagccggagcccgaaccgtcgcgacgggcgctcaacccgtcagagtggggcgagctcctgggcgtctaccaaggggacacgctgggcgaggaaccgatcgtcttgcactgcttcgagtcgctcgaggactctgacgcagaaggagacgccgcttgatgtgtttatgcgttaccggtccgagcatccagatgcgccggctctgtgcgggttttactggcactccacgcgtctgacgcgcgcggggaccgacttgattttcaataaattgcagggtgattttcaggcgcaagccacggggggaatgattaactgggaccaatgtaaagaattgctgttttcaataaagaaggacctcgaccagaggtaccgcaacatgttatggcactttagccaggggggcgcctgcgagcgctgtcaatactgggataatgtgtaccaagcgcaccaagcgaaggtgcagcttgagcgggaactcaatgttgtttcagaactgacggaccaggaaatgctggaggccgtcgaggacatggaggtggatggcgccaattagacgcccgggtggctgggtagtgccgggatacaagtacctgggtccattcaatcctctcgataacggggaacccgtcaataaagccgatcgagcggcccaaaaacacgatcaagcctataatcaatatctgtctgagggtaaaaacccttatctgtatttcaataaagctgatcaagactttctcgaggatctcgagtctgaccgttcttttggtggttggatcggtaagactgtgtttggagctaagcgagctattgcgccatcgctcggcgagccgagcgccaagcaagccaaactcgaccgcgcgcagaagcgcaagctctatttcgccagatccaatcaaaaagccaagcaacccaaaatggccgacacggccaataaccaagaaaatcctgaaggaggcgaagcggcgcctgctggctctcgatctggccaggccgctaacgcgggcggtggtggaggtggagccggacggagcgtgggcatttccaccggagggtggcgcggaggcacgctcttttccgacacgacggtggtcactcgggtaacgcgccaatggtactgtcccatctacaacggccatctctataaggcctttggcgcgcaagatgacgccgacagtcaaaagtcatactggcagggcatcagtacgccctggggctactttgactttaactgctacgcgggccatttcagcccgcaagactggcaacgcctcactaacgaataccgcaaatggcggcctaaagccatgcacattaaaatatacaatttgcaaatcaaacaagtggtcacactgggcgcggacacgctctacaacaacgacctgacggccggggtccacattttctgcgacgggtcgcatcagtatccgtatccgcagaatccttggaacgaacacgtcattccggaactgccgaacgacgtctggaaactgccgcaatacggctactaccagtacgacaaatggctcacgtcggatcaacccaacgacaacaacggagtgtccaaagctctccgcgtgatggcgccattgtttatgctggaaagttccagtcacgaggtgctacgcaccggggaggagaccgagttcaactttgagtttgactcggcctgggtcatgaacgaccgggcctacgcgtcgccgcagaccgactataacgccatcgtcggcacgcgacgctggtatccgactcacaacgccaacacgggctccttcacctacaatcgctacaatccttacaaaaaacccagcaactggatgccgggaccgggcacgcgcaacctcgggctcaaccagaccacgtcagattcttccaattctcgaggatcctttatgacggcgactatgccgaccagctattccattacatccggcaacaacagtctctctcacgatcaaaacattccaaaacccagcaacgattttcggcagcgagtgacgtctcaaactcagccggccaatggagcctgctcggccgtcgacggaccgacgctcacctttgacgtgggaccgcacaacgatacggacggcaccgtcacgtccaggaccatcgataacgacatgacgcgatggaacaccgtctactcggccaacaacaacaccatcaccgagcagccgatcgtctggatgtacccaaatcaggcctggaacagcacgcccatctgccggggtaatcctatctggagtaaagcgcctcgcaccgatcggcacacgctctacgacagcagcgacgggtcgctcgtcatggagcatccgccgggtaccatctttgtcaaaactcaaaaaattcctattccaactacggccaattcagacacctatctcaacctctacgtgacggggcaagttacctgcgaaatcgtctgggaggtcgagaggtaccacaccaaaaactggcgtccggaaattcgcaacacaccctcatcggacgagccgacggcctacgattttgatcacaccggggcctacaatatgccgaccaaatattacctacacatgccaacgcgcatgggcatcaattctgttctgtgattggttgcctttaataaaccgcttgattcgtgtcagtaaaaccggctctgattggttcttttcacgggactacaa

SEQ ID NO: 250 - DNA, 5224 bp, Mink bocavirus 1
  source 1..5224: mol_type = genomic DNA; note = Mink bocavirus 1 / Bocaparvovirus carnivoran 6 - NC_030873
catcagactccgcctactaaaaagaggaagtcaggttaatgaataaccagtaaccaatcactgtaaaggtcaaatatgacgtggcacatgtatataaggagggatccaggaagcagaaatcatactgcttccggccgtcgaggagagcacatctctcgtgtaagtaccatggcatatgttgaggaagaattggcggagattaacgatttaatccggtggggagatcctagttatacatatgtactgaattttccgctgcaaaagtggaaaggagatgaatatcgcatccagagagcgctcggcagtccgagctttcatgacttggataatggggaattatttctgcacatgccgggaccggatgagcctgagagacagagtgagtttttggctcacaatggtccttttagatcctatagtgtcatattggccaaagctgcatcgtctgccgcgagatttatctttaagcaaagacaaggaacagtaactcctacgtgtagtatctttgctcaagctgaaattggaaaggagaaaattcatgttcatcttgtgttgagcggagctggtctcaacaagtataccgcaaaggcatggacaaatcaactaggatatcactgggcaactagactcgttgatcattgcagagctgtgctcgaaatggacaactgtccagataaaatcatgtgccaacagttgttgaatctatttgaagctgaacgcgtcagttgcatgtctgatagatctaaattggcttctattatgcaatacaagaatagaaatggagaaatgtatgcgtgtagagtaaatggaccagaatacatctgcaactatctgctatgcaagaacctgaaatggtattatgtagttagtccagaattggcgacgccgcacgtttcatattttgtgggagcgtctggaacatacgcagttagtttactgaatgacaagtttatctcgctacattgtcgtcgccaatgggtagacaagataaagaagtatgtatccagagacgttgagcctgtgtttactggagaattgtttggcactctaccagaagtaagtaaaagtggatgggatgcgagaaaatcgggagagtgcatgaatgataatcctcaaaaaatcacaaagagagagaaattgatgttggattgtctgaagcgttgtgaggatgagcgattgacgacgtatgaagatttggtgaataagtgtccagaattggttgtgatgcttgaagcgacgagtggtggatcgaagctgattgatcaaatgcttggaatggtgcatattaaaatgagtcaaaaatatacagccttgacctatgtactgtccaagtatgagaaagaggaactagaaccagataacaaggcatggcaattgatgctattacagggctataatccgtggcaagttggacattggctatgttgtgtgctcgataagaaggctggaaagcagaacactataaacttttatggtccagctagcacgggaaagacaaatattgccaaggccatcgtgaattgtgttggactatatggatgcgtcaatcaccaaaataggaactttgtgtttaatgattgtgctgcgaagctgattttatggtgggaagaatgtctgatgcatagtgattgggtagaacaagctaaatgtatcatgggtggaacgacatttaggattgatagaaagcatcgtgattcaatgttgcttcctcaaactccgttgattgtttctactaataacgacatttatagtgtgactggtggaaatacggtgactggtgtgcatgcaaagcctctgagagaacgtgtcgttcaattgaatatgatgaaacaattgtcttctacgtttggggagattgatcctcgagagattgcggcgtggttacaagcgtgtatgactagattccaatgtgatttgaatgggttttattcacaatggggattggaaagaacgccgaatgattttccattaaataaattgtgtgctggtcatgatccacaggaatttgtgctgcatgagactggaatctgctctgcctgtggtggatactatccattagagacacgagatagaggacagccagagcctgcacagccacaaactattacaggtatatctctagtatcatccttgttgcatgaagatgcgtcatggttgactgatggagcaccattaactgaagatgatttaaattgtgtctttgcagagagtgaaactgtgcctgtagaggaaccacctaaaaagaagagacgaaaggagaaacatcaggtaattacagataccgactggagtagtcagcctaaagatgagctcgagatacagctatgggaacagtcactacggcaagagccagagcagtctacgggacaagatgagggaacgtcggagtccgtgggactctcgccgtccgagtggggggaactcctcgggatcatcgaaggagatatttcatcgggagaaccaccaatcacactccattgcttcgaggacatcaactgggatgaaatctgagaaaacgacaccaatgactgtttttgctcagcatagatcaatgttatctccagaacagagagaaaaagctgggtcttattgtggattttactggcatagcactagaatagctagaaagggcactgatggaatttttaacacttataaggcaaaatttcaagagattgcaatatgtaataagattgactgggatcagactagagaattgttgtttagttttaaaaaggaaattgatcaatgttatagaaatatgatgtatcattttagacattctccacagtgtgaaaattgtaaatattgggatgatgtgtatacgaggcatttggctaaggcgactgaacctgcttataatccttgtgttacacagggtggtgacgaggtaactgatgaagaaatgatggacattgacgtacctgacgtcaatgcctcctcataatagaaaacctggtggctgggttttgcctggtttcaagtatttgggtccgtttaatccattaaataacggtgaacctgtaaacgacgtagacaaagctgcgcaagcgcatgatcaagaatatcaaaaacttattgattctggtatcaatccttactttaatttcaataaagctgattctgattttatcgagaatttgtctcgtgacaattcatttgccgggtggctgggaaaatcggcgtttagactaaagagtatcctagcgccgcatcttccaaacgacggagcgggtccgagtccggctaaacggggaagatttgacgccgaacgtgctgctaaaagaaaactatattttgccagatcaaaccgtaagggaggagctgccaaaaagccgcgtctggatccaatggagggaccgagcgaccagattgaagggggcggtgatgggcccgaacaaaagacggcgtcgacgagtaacggtggaggtggcggaggaagcggcggacatggcgttggagtcagtacgggtgggtgggaaggtgggtgttattttgcagataatgtagttgtaaccaaaaacactagacaatggtacgctccaatctataatggacacaaagacactagaaatgatgggatggcgggacgtcagtggaaaggcatcaatacaccatggggctactttaatttcaacatttatgacgcgcacttttcaccacaagactggcaacgtctcactaatgaatatagacgttggagaccaaagtcaatgtttgtcaaaatttacaatttacaaatcaaacaagttgtaacgcttggggcagacacgctatacaacaatgatttaactgcaggggttcattttttctgtgatgggtcgcatcaatttccatattcacaacatccatgggacacgggtacgatgccagagttaccaaatagaatatggaagctaccgcagtatgcatactttacacaccagggagacttggttaatgctcaggaaaatacaggaatcaccaacgctactaatcaggaaaaaatgattgctgctagctatccaacctatatattggaacatgcgacgcatcaagtgctacgaacaggagaagaaactagctttcaattcaattttgaatgtggatgggtcaataatgacactgcttatgccattccacaagcagattttaatccattagtgccaacgagacgctattttcctgtacatagtagtcagagtaatacatttggttatgtcagatactcgccatacaacaaaccgagtatctggatgccgggtccatcgctgggatacgtaggatacacagagtctggatcaaactcacactatgctaggggaccaatcactgtcgtaacacagccgccaggaacagaatctgaacgagctagtctcagaactggggaaaatgcagatgaaacacctcaatcgagaacggtcggtgttcctggcgctccaattgacacgccagaaggacgaaacgcagtcagggccactgggtacgacatttcgccagtcaatggagccagatcaggactagatgccatcacactggcctatgatgcgggtccagaaagcgcatcaaccgatgccatcacggccagaaacaacgacagagacatggctagatggggaaacatgtatgctatagatcactacactacgagcggtaataccactaccacaaatatggcagaactcaaaaatgtctggatgtttccaaaccaggcatgggacagcacaccaatcactagaaatactccaatttgggtcaaaattcctagaacagataaacacacactgtttgattcttctgatggaacactacccatggcacatccacctggaaccatcttttgcaaggtagcaaagattcctatcccaacggaaaacaataccgattcctatctaaacctatatgtgacgggacaggtgacgtgccagattgtctgggaaacggagcgctaccagtccaaaaacttgcggccagagctgcgcacgtcggctggagagttcagggaccaaacgctgtacacgttcgacgcaaacggaacgtacaattctccagaaagatatcacgagggcatgccaacaaaacaaggcatcaacaaggtcctgtaacacatacaacaatatttctgtcatgtatatcttgttatccaaaccaataaaaatgtattttatgatcataaactgagtatgagtcatcatttagcttacaaccctctgttataactttagagcaaccaccaccacgcaac

SEQ ID NO: 251 - DNA, 5149 bp, Minute virus of mice
  source 1..5149: mol_type = genomic DNA; note = Minute virus of mice / Protoparvovirus rodent 1 - NC_001510
atttttagaactgaccaaccatgttcacgtaagtgacgtgatgacgcgcgctgcgcgcgcgccttcggacgtcacacgtcacttacgtttcacatggttggtcagttctaaaaatgataagcggttcagggagtttaaaccaaggcgcgaaaaggaagtgggcgtggtttaaagtatataagcaactactgaagtcagttacttatcttttctttcattctgtgagtcgagacgcacagaaagagagtaaccaactaaccatggctggaaatgcttactctgatgaagttttgggagcaaccaactggttaaaggaaaaaagtaaccaggaagtgttctcatttgtttttaaaaatgaaaatgttcaactgaatggaaaagatatcggatggaatagttacaaaaaagagctgcaggaggacgagctgaaatctttacaacgaggagcggaaactacttgggaccaaagcgaggacatggaatgggaaaccacagtggatgaaatgaccaaaaagcaagtattcatttttgattctttggttaaaaaatgtttatttgaagtgcttaacacaaagaatatatttcctggtgatgttaattggtttgtgcaacatgaatggggaaaagaccaaggctggcactgccatgtactaattggaggaaaggactttagtcaagctcaagggaaatggtggagaaggcaactaaatgtttactggagcagatggttggtaacagcctgtaatgtgcaactaacaccagctgaaagaattaaactaagagaaatagcagaagacaatgagtgggttactctacttacttataagcataagcaaaccaaaaaagactataccaagtgtgttctttttggaaacatgattgcttactattttttaactaaaaagaaaataagcactagtccaccaagagacggaggctattttcttagcagtgactctggctggaaaactaactttttaaaagaaggcgagcgccatctagtgagcaaactatacactgatgacatgcggccagaaacggttgaaaccacagtaaccactgcgcaggaaactaagcgcggcagaattcaaactaaaaaagaagtttctattaaaactacacttaaagagctggtgcataaaagagtaacctcaccagaggactggatgatgatgcagccagacagttacattgaaatgatggctcaaccaggtggagaaaacctgctgaaaaatacgctagagatttgtacactaactctagccagaaccaaaacagcatttgacttaattttagaaaaagctgaaaccagcaaactaaccaacttttcactgcctgacacaagaacctgcagaatttttgcttttcatggctggaactatgttaaagtttgccatgctatttgctgtgttttaaacagacaaggaggcaaaagaaatactgttttatttcatggaccagccagcacaggcaaatctattattgcacaagccatagcacaagcagttggcaatgttggttgctataatgcagccaatgtaaactttccatttaatgactgtaccaacaagaacttgatttgggtagaagaagctggtaactttggacagcaagtaaaccagtttaaagccatttgctctggtcaaactattcgcattgatcaaaaaggaaaaggcagcaaacagattgaaccaacaccagtcatcatgaccacaaatgagaacattacagtggtcagaataggctgcgaagaaagaccagaacacactcaaccaatcagagacagaatgcttaacattcatctaacacataccttgcctggtgactttggtttggttgacaaaaatgaatggcccatgatttgtgcttggttggtaaagaatggttaccaatctaccatggcaagctactgtgctaaatggggcaaagttcctgattggtcagaaaactgggcggagccaaaggtgccaactcctataaatttactaggttcggcacgctcaccattcacgacaccgaaaagtacgcctctcagccagaactatgcactaactccacttgcatcggatctcgaggacctggctttagagccttggagcacaccaaatactcctgttgcgggcactgcagaaacccagaacactggggaagctggttccaaagcctgccaagatggtcaactgagcccaacttggtcagagatcgaggaggatttgagagcgtgcttcggtgcggaaccgttgaagaaagacttcagcgagccgctgaacttggactaaggtacgatggcgcctccagctaaaagagctaaaagaggtaagggtttaagggatggttggttggtggggtattaatgtttaattacctgttttacaggcctgaaatcacttggttttaggttgggtgcctcctggctacaagtacctgggaccagggaacagccttgaccaaggagaaccaaccaatccatctgacgccgctgccaaagagcacgacgaggcctatgatcaatacatcaaatctggaaaaaatccttacctgtacttctctgctgctgatcaacgctttattgaccaaaccaaggacgccaaagactggggaggcaaggttggtcactacttttttagaaccaagcgcgcttttgcacctaagcttgctactgactctgaacctggaacttctggtgtaagcagagctggtaaacgcactagaccacctgcttacatttttattaaccaagccagagctaaaaaaaaacttacttcttctgctgcacagcaaagcagtcaaaccatgagtgatggcaccagccaacctgacagcggaaacgctgtccactcagctgcaagagttgaacgagcagctgacggccctggaggctctgggggtgggggctctggcgggggtggggttggtgtttctactgggtcttatgataatcaaacgcattatagattcttgggtgacggctgggtagaaattactgcactagcaactagactagtacatttaaacatgcctaaatcagaaaactattgcagaatcagagttcacaatacaacagacacatcagtcaaaggcaacatggcaaaagatgatgctcatgagcaaatttggacaccatggagcttggtggatgctaatgcttggggagtttggctccagccaagtgactggcaatacatttgcaacaccatgagccagcttaacttggtatcacttgatcaagaaatattcaatgtagtgctgaaaactgttacagagcaagacttaggaggtcaagctataaaaatatacaacaatgaccttacagcttgcatgatggttgcagtagactcaaacaacattttgccatacacacctgcagcaaactcaatggaaacacttggtttctacccctggaaaccaaccatagcatcaccatacaggtactatttttgcgttgacagagatctttcagtgacctacgaaaatcaagaaggcacagttgaacataatgtgatgggaacaccaaaaggaatgaattctcaattttttaccattgagaacacacaacaaatcacattgctcagaacaggggacgaatttgccacaggtacttactactttgacacaaattcagttaaactcacacacacgtggcaaaccaaccgtcaacttggacagcctccactgctgtcaacctttcctgaagctgacactgatgcaggtacacttactgctcaagggagcagacatggaacaacacaaatgggggttaactgggtgagtgaagcaatcagaaccagacctgctcaagtaggattttgtcaaccacacaatgactttgaagccagcagagctggaccatttgctgccccaaaagttccagcagatattactcaaggagtagacaaagaagccaatggcagtgttagatacagttatggcaaacagcatggtgaaaattgggcttcacatggaccagcaccagagcgctacacatgggatgaaacaagctttggttcaggtagagacaccaaagatggttttattcaatcagcaccactagttgttccaccaccactaaatggcattcttacaaatgcaaaccctattgggactaaaaatgacattcatttttcaaatgtttttaacagctatggtccactaactgcattttcacacccaagtcctgtataccctcaaggacaaatatgggacaaagaactagatcttgaacacaaacctagacttcacataactgctccatttgtttgtaaaaacaatgcacctggacaaatgttggttagattaggaccaaacctaactgaccaatatgatccaaacggagccacactttctagaattgttacatacggtacatttttctggaaaggaaaactaaccatgagagcaaaacttagagctaacaccacttggaacccagtgtaccaagtaagtgctgaagacaatggcaactcatacatgagtgtaactaaatggttaccaactgctactggaaacatgcagtctgtgccgcttataacaagacctgttgctagaaatacttactaactaaccatgctttttctttctgtacttcatatattattaagactaataaagatacaacatagaaatataatattacgtatagatttaagaaatagaataatatggtacttagtaactgttaaaaataatagaacctttggaataacaagatagttagttggttaatgttagatagaataagaagatcatgtataatgaataaaagggtggaagggtggttggtaggttaatgttagatagaataagaagatcatgtataatgaataaaagggtggaagggtggttggtaggtattcccttagacttgatgttaaggaccaaaaaaataataaaacttttttaaaactcaaccaagactactgtctattcagtgaaccaactgaaccattagtattactatgtttttagggtgggagggtgggagatacatgtgttcgctatgagcgaactggtactggttggttgctctgctcaaccaaccagaccggcaaagccggtctggttggttgagcgcaaccaaccagtaccagttcgctcatagcgaacacatgtatctcccaccctcccaccctaaaaacatagtaatactaat

SEQ ID NO: 252 - DNA, 4339 bp, Murine adeno-associated virus 1
  source 1..4339: mol_type = genomic DNA; note = Murine adeno-associated virus 1 / Dependoparvovirus rodent 1 - NC_055485
tagtagccgccgaaggcggctactatcgtcggacgagactaggcgccttcggcgcctagtctcgcccggggggcgggcgcttggtgagcgagcgagcagataagataaaaacctacttcaacacgtgaagacttggagacggatgttgttttgtctgtttgctttcctgttggtaggctccgcctttctgctaatatggcggatatgcaaattatgttcgcaatgcctgctgggtaagtcaccgtatgtgtaaagtgtatgtgtgtgactaagcatctttgttcacttcgcgcgattctctcgctcgctcacgatgacgtcgttctacgaagtagtggtgaagctgcccagcgacttctacgatgacctgcctggaatcgaccacgtctggatcgacaacctctgcgaggagaatctacaccctccggatacgtgtgactttgacctgtctttggttgaacctgcctatgttaacctagctgaacgaatcaagcaagagatcatcttggagtggagttatcgcgctggaaaacacaggtactttattcagctcgaaaagggcgaacaattctttcatttgcacgtgctattggacacggtggacgtgaaaggattcgtctttgcccgctacgcttccggtttcaaacaacgaatcagagaacgcgtctactgcggaatcgagcctctaatacctgattggttcgaaattaccaagaccaagaaggtaggcggggctaacgctgtgcgtggagaagcctatatatataactacttgctacccaagaagcagtcggaactgcagtgggcttggacaaatatccccacttttgaactcgctgctttgaacttgaacgagcgacagcgtctactggaagaaaggcgtgcggaagaacttgctgctagagaggagagacaacagtcggactctaactctcagaatcgagtctacggcaaagccgctgaaaggtatatggccctggtgaactggctcgtgagcaacggcatcacttccgagaaggaatggatccaggccgaccaggtgtcgtaccttacccagaacgccacttccaatggtcgcgctcagatcaagaccgctctcgacaacgcttctcgaattatgcagctaacgaagacggctaccgattacctgattgggccatcaccgccggcagacgttaccacgaatcgtgtgtatcgcatattcgagatgaatggctacgatccccagctggctgggagtatactgttaggctgggccaaccgccgatttggaaagagaaacgccatctggctctatggtcccgccaccacgggcaaaacaaatattgcagaggctattgcacacgctgtgcctttctatggatgtgtgaactggaccaacgagaactttcccttcaacgactgcgtcaacaagatgctcatctggtgggaagaaggcaagatgaccgccaagatcgtcgagtctgccaagagcatcctcggtggcagtcgcgttcgcgtcgatcagaagtgcaaagcgagccaacagatcgacagcactcccgtcatcatcaccagcaatacagacatgacgatggtcgtcgacggcaacactaccactttcgaacaccgagaggcgctcgaggatcggatgttccagttctacctgggaaagagactcgacaatgattttgggaagatcgacaagaaagaagtgcgcgagttctttaaatgggcggagctgaatcaagttccgccccctcacgtgttcagagtgcctcgggtccatgacgctgggtataaaaggccagactctcctgctgcttcgtcatacgcgacggagagacccagcggagaggagcctgctgccaaacgcccgaggtacgaacacaaaccggtggacaatgggagggaggagaaaagtacgctggacttgtggtttcatgggaatcccacccctgcccccatggtcgtgcacgacctgatggattcgagcggttctgtgtttaatatgactattcgggagtgccccgattctaataaagagcaatgatttactcaaagtagtcatgtctttctttgattggataggtaaacagtacgctcaaggagctgctgaattctgggatttgaagtccggtcctcctgcaccaaaaaaggcgcgaaaggacggatccgccggattcaatttccctgggcacaagtacctgggtcctggcaattcattggatcgcggagatcccgtggacgccgacgacgctgctgctcaaaagcacgaccagtcgtatcaagaacagcttgaggcgggagacaatccctacctcaagtacaatcacgcggatcgcgagttccaggaggcgttgaaaggagacacctccttcgaaggaaatctcgcgagaggactctttgaggccaagaagctcgttgcagagcctctcggccttgttgaaccggaactggcgccacctagtggccgcaagcgaccggtgcaatcgagtcaagaatctggttactcgagtagccaagacaagcggcccaacctcgacttagacgaggaggatcgtgagctcgctgccgctgcagcggagaccgaaactggaagcgctccccccaccggcaatttgggacctggtacgatggctggaggcggtagcgcgccaatcgacgacggctcgtatggtgccgatggagtgggcaatgcctcgggagattggcattgcgattccatatggatggacgaccgtgtcgtcacccgcaccactcggacctggaacctgcccacctacaataaccacgtctacaaacgactcaacggaaacacggaacagaccaccggagatggaagctacttcggattcagcaccccgtggggatacttcgacttcaaccgcttccactgtcatttctcccccagagactggcaaagactcatcaataacaattggggactcagaccaaaaagtctacggttcaaaatctttaacattcaggttaaagaggtcacggtgcaagaccaaacgacgatcatctccaataaccttaccagcacggttcaagtgtttgcggacacggactatcaattgccgtacgtgattggttctgctcacgaaggttgtctgcctcctttcccagccgatgtgtttatgctgccgcagtatgcatactgcactcgacaagacacaaacagcagtaatcccactcccagaagcgctttctattgtttggaatactttcccagcaagatgttgagaactggtaacaactttgaatttacttacaattttgagaaggtgcccttccacagcatgtgggctcataaccagtctttagatcggctgatgaaccctctcatcgatcagtatttgtactacctcaatcaaactacaaatagtgctctatccagccgatctaagactggttatgaaccctctcatcgatcagtatttgtactacctcaatcaaactacaatagtgctctatcctacaacaaatcaacaaaatcaaatctacctgagcaagaacgcaactggctacctggacctggcatcagaaatcaaacgtggttcagcagtggaactggcaacatggctgtagacgccatgtggaactactcgaataagtatgtgctggagaacagagcttccaagattgctcctggtccagctatggggattgagtcaacaaaagtagatggcaatggactaatcttctctaaagagtatataactaattcaaccaccgcgaatgctgatcaagtgaacgtcactagagaaactgaaatcaactcaaccaatcccttggcgggcaaatcacttggagctcatgcgaacaatatacagaaccagacaacactgccaacacttgctaatactgacatcatgccggtactacctggcagcgtttggcagaatagagatatctaccttcaaggccaaatctgggcgaagattcctcacacagatggacactttcatccttcaccgctaatgggaggattcggtctaaagaatcctcctcctcaaatactgatcaagaacacaccagtgccagcaaatcctccggtagaatttacagctggcaagattaactctttcatcactcagtattcaactggtcaagtcacagtcgaaatggaatgggaacttcagaaagaaacatccaaaagatggaatccagagatccaatacagcgacgactcatcagccaccaaccaatcggtgctgcactttgctccaaacgaaacaggagagtacaaggaattccgttcaattggatcccgttatctcactcgtcctctgtaaatgtttcctcatgttatgtcaatttttctaataaaacgaaacccgcatgggtgattcgg

SEQ ID NO: 253 - DNA, 4449 bp, Murine adeno-associated virus 2
  source 1..4449: mol_type = genomic DNA; note = Murine adeno-associated virus 2 / Dependoparvovirus rodent 2 - NC_055486
aggcggcatcttccgtcggacgctagtagccgccttcggcggctactagcgctcggccgcgcttgaggagtgaacgaacgaacccagaagagaagtgccacttcaaatgaaggggaaattggaggcgtgttttttggtggtcgtgttgtctgcctgtggttggccacgcctttcttccaatatggcggatatgcagatttgtcgcaatgcatgttgggtaactcaccgtgagtgatatgcggttgatgattaatatctcactcagacatagctcgcaaattctcttgttcattcgccatggcgtcgttcttcgaggtcgtcgtcaagctgcccaacgatttcttcgctgacctgcctgggatatctgacctctgggtggagaccatctgcaacgaggaactacatccaccggacacctgtgatttcgacttgtcgctggtagaatctccctacgtggctttggcagaacgagtgaaacaagagatcatcttagagtggagttatcgcgcgggaactcacaaatactttattcaattggaaaaaggtgagcatttctttcacctacacgtgctactggactgtgtgaacgtcaagagcttcatcttcggaaggtacgtggcgggctttcgagaacggattcgagatcgagtctacagcgggattgagccccagcttcctgattggctcacttcctcaaagacaaaaaagggcggatctaacgctcaacgagacgaagggtatatatatgcctacctgttacccaagaagcagtcggagctgcagtgggcctggacgaacatcccaaagtttgaactcgctgcgctcaatctaaacgaacgacagagactgctggacgaaaagcgtgcggaggatcttgcggctgaagcagagaatcctaagcctgagcacaacccgcgttcattcggcaaagcggctgaaaggtacatggcactggtgaactggttggtggagaacggcatcacttccgagaaggaatggattcgtgccgatcaggtgtcgtaccttacccagaacgctacttcgaacggccgtgctcaaatcaagagcgcgctcgacaacgccagccgtatcatgcagctgacgaagacggcgatcgactaccttattgggcctacaccgccagaagacgttaccacgaatcgtgtgtacaaaatcttctcgctgaatgggtacgatccccgactggctgggagtattctgttaggctgggccgctcgccgattcggcaagagaaacaccgtctggctctacggtcccgccactaccggcaagacgatcatcgcccgggctattgcacacgctgtgcccttctatggaaatgtgaactggaacaacgaaaactttcccttcaacgacagcgtcaacaagatgctgatctggtgggaagaagggaagattaccgccaagaccgtcgaagccgccaaagctattctcggcggcagcgacgtccgcgtggaccagaaatgcaaggccagccagcagatcgacactactcccgtcattatcaccagcaatacggacatgactctcgtcgtggatggcaacaccaccacgttcgaccacaaggaggcgctggaagaccgaatgtttcagttctacttgttcaggaaactggaccacactttcggccgcgttaccaaagaagagatacgcggtttctttaagtgggcggagctgaatcaggtggaagtgccccacgtgttccgggtgccccggacgctcgatataagcagctcctctccatccgcgagcacagttgccgcgtcgacttcggagagtgaggagcctgccgacaagcgtccgaggtacgaacaaccggtggacaatgggagggaggagaaaagtacgcttgacttgtggttggagggacggcctacccctaagcctatgttcgtggctgatctgtctgctgctaaaagttctgtgtttgatatgaaagttcgggactgtcccgattctaataaagagcaatgatttactcaaagtagtcatgtctttctttgattgggtaggtaaaaagtacgctcaaggagctgctgaattctgggatctgaagtccggtcctcctgcaccaaaaaaggcgcgaaaggacggatctgccggattcaatttccccgggcataaatatctcggacccggtaactctctcgatcgaggagatccggttgacgccgacgacgccgctgctcaaaagcacgatcaagcttatcaagagcagcttgaagcgggagataatccctatctgaaatacaatcacgccgatcgcgagttccaagaggcgttgaaagacgatacctcgtttgaaggaaatctcgcgagaggactctttgaggccaagaagctcgtggccgagcctctaggtctcgttgaaccggaactggctccggggaagaaacgcccagcggcttcccccgttcaatcgccagactcgtcttccggtatcggcaagaagggcgcgcaaccttcccgccgaagattggactttgaccaggccgatcgagaaaccgctgccgaggctggagccacaggcaccggaagtctaccacccgcctctaatttgggacctgttacaatgtctgctgggggaggcgcaccgatggacgacaatcaacaaggtgccgatggagtgggcaatgcctcgggaaattggcattgcgattcccaatggctgggcgacagagtcattacaaagtccacccgaacctggagcctgcccacctacaacaaccacttgtacaagaagatctccagcaacgaagcttcaggagacaagacttggtttggattcagtaccccttggggatactttgacttcaaccgcttccactgtcacttctccccccgagactggcagcgtctcatcaacaaccactggggcatccgcccgaagaagatgcacgtcaagctcttcaatattcaagttaaggaggtcacgacgcaagactcgacgacgaccatcgctaataaccttaccagtacggttcaggtctttgcggactcggaatatcagctgccgtacgtagccgggaatgcgcacgaaggatgcttgccaccttttccagctgatgtctttatgctgccgcagtacggctactgcactctccagaacagcgcttccaacgatccagtggcccagagtgccttctactgtctggaatatttccccagtcagatgctgagaacgggaaataactttgtcttcagctacgagttcgaagacgtcccgttccacagtatgtacatgcacaaccaatcgttggaccgcttgatgaacccgctgattgatcagtacttgtactatctctccgccaccaatgctcccgccaatacaaataaatttaccaagtcaaataaaggtgatctaccgtctcagctcaggaactggattcctggaccttcatttcaacaagcagcttggactctagacggacagagtcaaacccaaacgaacaacacgtgggattatgccaataaataccaattggatgcacgaaagaacaagttggctcccggtccagttaatgcacctcgagaaggacagtttcaagcaaatacgctgatattcggcaaagatccaaccgtctcttctaccttggctgaacaagacaaagttaacattacacgagacaatgaaactcggacagtaaacccaattctgggaacggctcagatatttgacatcatcaacaacgacactccgcgtgcgaacggctcaataagcaaaatcaacatgaacatctgtcctgtcatgcctggaagcgtctggcaagatcgagatatctacctacaaggaccaatctgggccaaggttcctcgcacagatggaaagttccatccctctcctctcatgggtggatttggacttagatgtccacctccacagattttcattaagaatactccggttcctggcaaccctccaacaacatttgaaccaaccaaagtggccagcttcatcacgcagtactcgaccggacaagtcaccgtcgaaatggaatgggagcttgaaaaggaaaactccaaacgctggaacccggaaatacagttcaccaacaacttctcctcttcggacggaaacatggtccactttgctgtggactctaccggactctactcagaaccccgtcccgtgggcacccgttaccttacccgctctttgtaaccctatgtatatattacaacaaataaaacgaagcccaacagggcgattcgaaaaccaacagacacgcctccaatttccccttcatttgaagtggcacttctcttctgggttcgttcgttcactcctcaagcgcggccgagcggaagagaagtgccacttcaaatgaaggggaaattggaggcgtgttttttggtggtcgtgttgtctgcctgtggttggccacgcctttcttccatggcgaatgaacaagagaatttgcgagctat

SEQ ID NO: 254 - DNA, 5069 bp, Murine bocavirus
  source 1..5069: mol_type = genomic DNA; note = Murine bocavirus / Bocaparvovirus rodent 2 - NC_055487
ggaaatgccatacaggaaatgacgtcactgggaggagctaacagactatataagagactaaccaggaagtgattcatcatttctccggagagctcgacctggtgagtacgctggattccggcaccatggagagcctgtatgcgagctttgcgagcttttacgagcctgcttatacttttattatcaagcttccactcagagattggaagaatattcaatcatccctgcagagaactatcaagggaggtccttggcatgacattttagacaccgaagaggactttaaaagagctagaaactcgatgggactgctgttgctcatggaaaaacacttccaatctgacctttgtaccatggcacattgggcggctagaagggagtttgagaggaagcaagcgacgaccgaaccgcagtactcatgctatgctcaggtagaactaagcgaccaggtgcacgttcatctggtcctgggtgggaccggactgaacaaatatacggccaaggcctggagaaatactctggcctacaatttcttttctcaagtcgagcagagacagaaagagatcctgggtccgcactacaacagtgtagaatggttggctgccacggttccgatctctttagccaagaacgaatgctttcagaactacactaagaactgcaccattctgcaataccgagccaggaatggtgatatgtacgcttgccgagttaatcctaaagagttttgtgccaactacatgcttcctaaacaactctggctcaatacatacaccacagttgaagatctcactccagacgagagttactttccacagacaactaaatcttacagctacaccacactcaacggcgaggtcatcaggcctgaacacagacgacggctgcagttccagctcttgcaggactttaacgggcagcagagcgagcccatctttgggggagatccattaagcgacttgcctaaggtagaaagagccacttggcagaaaacctctcaaccggcgggtaaaatgaccaaaagagagggtctggtgctcgattgcatgcaacgagccgtagacggtgaccttttgacttatgaacaaatggtggacgcacacccagaacttgtcattatgttggaaagtcaggcgggaggcgggagactgattgagcagaccttgagcatggcacacattaagattacgcaaaagtatactgctcttagttacatattaaaaagatatccagaggccgaagtcgaagcagatagcaaggtctttagactcatgaacctacaagggtacaatgcttggcaggccgggcactggatagctacggtcttaaacaagaaggccggtaaacagaatagcatttgcttttacggtccggccagcaccggcaaaactaacatagctaaagctatcgctaactgtgtcaagctctacggttgtgtcaaccacttaaacaaaaactttgtctttaacgactgcgccgctaaattggtgatctggtgggaggagtgtctgatgcaccaggactgggtcgaacaagccaaatgttgcatgggaggcaccgaatttagaatagacagaaaacacaaagaatctcagctgctaccacagactccagtcttgatttcgaccaacaacgacatttacacttgtgtgggtggaaatgtcatcactcacgtccacagcaaaccactcaaggaccgggtagttcaatttaattttatgaaatcactcgagagcacctttggggagatttcagaacaagagattgccgactggctagtcgactgttccagaagattcgagtgcactctagaaggcttttaccgacaatggggcgtgagaaatgttccaaatgacttctttttaaacaaactgtgtgcctctcattcacaggactttactcttcacgaacacggcctctgtctcgattgcggtggttatctacctctacgtgaggatcctgagtctgctgaagataacgaccagacctttgaaccgggtagggaacttgataatttactgagtcaggaagttatgcgaggcaccctcaactttgacactgaatttgatttcgatctttcacttttagaaccagcatccacacacgacagaaagcgccttcactcgaccgacgaaggtactgctgctgaagaagaacctgaagaaaaacgacacaaggtaaattgggattacgtgagtcgtcgctttgccagccaaccagaagatgagttcgaccagagagagtacgaagaactcgtacgcgaagccatggaagaagaggagccgcagccggagcccggaccagggctcacaccgtcggagtggggagagagactcggaatcatcgtacaagcggtcgaagaaggagaaccacccatcgtcctgcactgcttcgagaacctctcagaatcggacgaggaaaccgcacaatccttttgagatcttttcggctcacgccgccaaagagaatgtgaactttgggtggtgcgggtactactggcactcaactcgattagccaaaaaggggactgacatgatctttgatgatatgaaaaaagaatttcaatctcgatgtacggaaaataaaattgattgggcgggggtgagggaaatgttgttcaaatttaaaaaaaccatggatcagcaatatagaaatatgttatggcactttcgcaatacagaatgtcacaaatgtgattactgggatgatgtctacagaaagcatgtagctaatgtagaacattcttcacaggaaataagcgacgaagacatgctgcaggcagccatggaagtagatggcgcccgtgaatagaaaaccaggaggttgggtgctgccgggatacaaatacttgggtccttttaatcctttgaataacggaaaaccaattaataaagctgatagagccgccagacggcatgatataagctataataaatatataaaatctggaaaaaatccatatttaaactttaataaagctgatcaagcctttcttgacgaattaaaaaacgactattcctttggtggtctattgggaaaaggtgtctttcagataaagaaagccattgcaccaacactcaacgaggcctcaaggggaggcggacaaacctcgcagaaaaaacaaatagccaatagaaaaagagcactttactttgcgcgtcagaatagagacgccaaaaaggccaggatggattcgggaggtgctagcaactctgatgagcaaccgagccagtccagcgcggctcaagagaaccgggccggaggaggaggaggcgccggaggaggtggcggaggcggaggcatcggaggatccggagtcggggtctccaccgggggatggactgggggaacacactttggggacaattttgtcgtcacgaatgtgaccagacaatggtacgctcccatctacaaccaacacatgtacaagaaaatcaaagcagacaacacggtagacacagagtgggagggtatttccactccgtggggcttctttaactttaacagatatgcctctcatttcagtccacaagactggcaaaggatgtgcaatgaatacaagaggtggagaccaaaaaaaatgcaggtccagatttacaatttacagattaaacagattgtcaacatgggggcagacacactgtacaacaatgacctgacagcgggcatgcacatttactgtgacggatctcaccaatatccgtacgcacaacatccctgggacgaacagacgctaccggagctgcctaacgacgtctacaaattacccaattacgggtactatcagatgacaggagacctggtcaacaatgagcaaaactcacaatacaacctagaaaagtggctgaaactagctgctccactctttatgctagaaaattcttcacacgaagtactcagaaccggggaagagactagctttgaatttgtttttgactgtgggtgggtgcacaatgatcgggccttttgtccgccgcaagcggactttaatccactcgtagagacacgtagatacaggccatactggaaacactcagaaaacaaattcaaatactacagattcaacagatttaataagccgtccaactggatgccgggtccggggtgcaaatactggggagatctcagaccacataccaacaccaatggtctggccaagggaccgtggaccacaacctggtgtccgccgggtaccaacaacagccatgacgcagaaacggccttcggagaacatgagcccgatgttaacggtatctaccgacagggcatatccacagatccttgcaatgcagcctgctcagcaaaagactatccgagactagcctatgacacggggtctgacagaaatgccgacgaattcgtctcttcacaaaatgtagacctagacctaaccagatggggcaccgtggggtaccacactagcatccagcgtgctaaccaggacccagacgcagccatcaccaaggaacccatggtctggcagtatcccatgcaggcatggaacggctgcccgatcagcagatatactcccatttgggataagcaaccaaacacagactaccacacgactctagccagttcagacggaacactgcccatgactcatcctccaggcaccatctatgtcaaagtagctaaaatacccattcccacagaaaacaatgcagacagctacctcaacatctatgtcacgggacaggtcagctgcgaaatactctgggaaacagagaggtaccaaaccaaaaattggagaccggagatcagaatctccagtgcccaattctccgacggagacatgtacaatatagacgccaacgggggctacaacaactcagaacactttggagaaaacatgccaacaagactcggcatgaaccgggtcaactaaataaaaagtggcaacctttgccctcaaacagtcttgcgtcattttgttctacgggtcttgctatatcttaaaagcactagtagtagtgcgccatcttggatttctcaataagggtaataaaggaggcgtgcctcttttttattacgtctgttctgtattaattctacattacatgcgctgc

SEQ ID NO: 255 - DNA, 5038 bp, Myotis myotis bocavirus 1
  source 1..5038: mol_type = genomic DNA; note = Myotis myotis bocavirus 1 / Bocaparvovirus chiropteran 1 - NC_039045
cagccaataataacagtacacgtggcataatccaataggacaagcaaaacaataaaaacagagaacccggaaataagcttcattctgcctctaggcagcaaccagacaacatcaaaaaaagaagacctgcattaaaggtaagaatttatttaattatttctactaacaaataacatttttaaacaaaaactaacatttaatcacttattttaaaggtgttaaaatggattcacctccatctacacctagaaatgcagacatacctgaaactatcaaactactaaccgatgacataaaaacattttacaaaccagcctatacatacatactaaaattaccatttcaaaatctaaaagatatagaagatgatttaatctccatgctatcaccaaaatacaaaggcattttaacaatgatcctagaaggtggcatggacaacatttctaaaatgaaagaaatagacacaagagatcctgtagaagttgaagactacagaattgctatgattccagataataaaggttatctatatgaattaactcaaagtgcatatgatgctgtaaacgaattcatcagcatcaaaaaagggctgcaaaccatttcatgggcctgctgggttcaaggagaaatttccgaagatgaactcttacacgtccacatagttcttggctcaagatgtctaaacaaacacaatgccaaacgagccaaggaaatcctgtgcaggctatttttgcagcaagtaaaattccgtctggaaaactacagaaggaaatggggtttgacaccaagccaaagagagatattccatgaaattctctcatggctgaataccccagatctgggacatagcgagctgataagcatacttcaatacacagataggagaggcttcaatcatgcacaacaagttgatccaaaatcttttattcaattctacctactgcctaaaaacagaaaactaactcttgcattacaaccacgagaatgcacaacagcaaaagctttttttctcattagcaacaaaacatacgggtgttcaattttgaatggacacataattccaagcatacacagacacaccttatggagcaacctggaaaagatggacgaaaaagaagacccaggacaagaattgaagatcgcgaatccttggagagacttgcctcaagtaaacaaaaatatccttttaaaagaaaagaatacgggtgggaaaaatagaattacaaaaaaaactagtttaatgttagatatgctaaccagatgcaaagataagcttttaaccacatatgaagacatggttagagaagaaccagaactattgttaatgcttgaatcctcaggtggaactaagctaatagaacagttactaaatatgctacacatacattttactcagactttcactgccatgactatgatcacaacaagatatgatgaagacagcatcatcatcaatacagaaaataaagctatgaaacttttactttttcagggatacaatccctttcaagcaggacactggctatgctgcgtcctaaacaaatcctcaggaaaacaaaatacaataagcttttatggaccagcaagcacaggaaaaactaacattgccaaagctattgttaatgcatgtttactgtatggttgtgtaaatcattcaaacaaaggttttgtatttaatgactgcgccgcaaagttaattgtatggtgggaagaatgtgtgatgcatgcagattgggttgaaccagcaaaatgtatatttggtggcacagaatttagaatagacagaaaacataaagacagcatgttactaccaaaaactcctgtaatagtatccactaatcacaatatatatgaagtagtaggtggaaatgcaacaacaggaattcactgcactccattaaaagaaagaattgttcaatttaatttcatgaaacaattacaaaacacctttggagaaatttccgaaaaagaaatcgcagatctactctgctggtgctggaaagaatacgaatgcacacttacaggcttcctaaaaagatggaacctagaaaaaacaccaaacacatttccattaaataatccatgtccttctcattcacagacctatatattgaactcggccgggttctgcgaatcctgtggcggattcttacagccactatcattgaaaggtgcatcagcaccaacctcggagactacactgacagcagacaaagaaacacagactccgagcactccaaaaaccagcccagcaaaagaaaaaggtaaaaaaagatctcgcgatacactagaaacagaagaacaatacctaacacacatacacactctcaataccatcgatgcaaatcaaaatccagatcacattgcatacagtcaaaatttctaaccatttaaaattaacagatcctgttctttctgctgtgggacaaacaccaaagaagagacggaggctcattcttgcctccgactccagtgaagaagaacaagaggatcctcaggtcatagagtgccatacaagcctctctgacctaagtatccaagatgaagagagcacactctccggcatctacgagttggaagtcccaaccgatgtcgaagaagacctcagatgcgaagaaatcctttaaaaaaaaagatcctacctttagaacaccatatgatctattctcagagcacaaagcatccacgggctgcaaacatgatttctgtggctttcactatcacagtgcacgcttagccaatctaggcactacatatatctatgatattatgcaaaaaaaatttcaagaaaaaagcactgacaacaaaattgattggaaaataaccaaagaaatgctttttgctctgaaaaaaatgcttgatcaaaaatacagaaatattatgtatcatggaatgatggggggaaactgtcataaatgtaaatactgggataaaatctatactgaatatttaagcagcagagcctgtaataacgaatcctctcttgaaatttctgaccaggaaatgcttgccgtgatggagtcaactaacaatgcctccacttaaaaaaaatcaaagaggatgggttctacctggttataaatatttaggcccttttaattcactaacacaaggaaaacctactaacaaagctgacgaagctgcacggcgacacgacctgcactataacgatctaataaataaaggacataatccttacctgaactttaatgaagctgatgttaacctaataaaagaccttgaaactgacaacagcattggtggtttcattgcgcgaaacgtgtttaaagctaaacaggccattgcacctgctctgccaggtacctcctcaggaggtgacagggccacaaaaagaaagctttattttgcacgatcacaaaaaagcgcaaaacaaccaaaaatgtcagaccaggtcgacgcaccagcagaaggcgctgtccgcggagatcttagcagcatggcaacacacagtcgcagcgcacgcgcaatcggcggcggaggagggggaggcgggggaggaggaacaggaatacgagcaggaggcggagtcggaataagcacaggaggatgggaagcaggaacattcttttatgataatcacatagtcacagccaacaccagacaattcatggctgaaattcaaaacagccatctatacaaactagaaaccgcaaccattgaaaacacagtaccagatgcaaattacacatatgtaaccactccttggcaatactttgacttcaactgctgggcttcacatttcagcccacaagactggcaaagagtaatgaacgaatacaaaagcattaaacccattgaaatggaagttaaaatatataaccttcaaattaaacaaatccaactgctgggcgctgaacaagacattgtctacaacaatgatctaacagccgccttacatgtgttctgcgatggcgaacaccaatatcctgatgccagtcaaccatgggatgaaggcacaatgccagaactcccacatgctatttggaaacttccacaatatgcatactttcaaacaatcagtggatgggctgcaaatccaacattcggagcacaagtaccactatatttcattgaaaacagctcacatgctgtactccgaacaggagaagacgcaaccttctccttcacattttcatgcaacaaactcacacttgacaaatgtgctacagcacccgtacatctaaaaaatccaaaagtaaaaaccagaagatataaaacagcagccgaaagatggcctgaatacaaaaagccatcaacaaacatgccaccacccagcttaattggcctcaccgcatcacaaactgacatcaaacatcccaaaggacctatatcttcaatgccaacaataaaaggtcctaattacccagcacaaggtattgccaacgaagtatcactatgggacacaaatccaatatcaggaggcagacaagaaatctcagaagaaagaagaacatactacacaacaccaaatgacccaggtgtaacaccacacgtgcacggagatgacacaaacacagatgctgcaagagacagaaatgtatattatagagaaaacagctcagacaatccaccagtaacaacatcaatgtggatgatgcccaaccaatactgggacagagctggagtaagcagatattatccaatctggacaaaaaaaccaagaacagacatgcatacaatcccagatccaggagatggtaccataccaatgtcacatcctcctggaaccatttttgtaaaaatggcacaaataccagtacctggacaaggtgacagcttcctcaacatttatgccactggacaaataagctgcagaatagcatgggaagctgaaccatatataactaaaaactggagacctgaattcaggcactcctgtgaaccaggaactattaatacatacaacattgattcaaacggaagatactcagttcccagtactttcatgggagcaatgccaagcaaaatctgcatcaacagaaatatataaccacatagaactatttttcatatactg

SEQ ID NO: 256 - DNA, 5249 bp, Ovine hokovirus
  source 1..5249: mol_type = genomic DNA; note = Ovine hokovirus / Tetraparvovirus ungulate 4 - NC_038547
cctgtttcacacttccgcttccgctacctcacttccgcttccgctacctcacttccgctacgtcacttccgcattagtgctgaatcagcgctccgggcgccgcctacttccctcgccacacctacctcgccatcaagaatcaggctcagacacgtcagcctttcagttcgtcccggacgtcgcccaggatggatgcctcctgcttcaccgccgtgctccagatccccacgctgttctgtgagtctgttcctgttcaggtggaatctcccgccatactactaaggtctgtagctgatgattaccccgactggccagtagctgacttacagcaatatgcagctcattttgatttagcggtaaatctcggccacattttatacagagagttactggagtcctttgccatgctgctgccgctgtactcaacaccaaagctatttctacagcttgaaccgagcaacagcgatgggcgcgaatttcattatcacttagtctgtgaacaaggtgatatgagtggcagagagttttctacctggctgaaacggtggcgcactttcatggatagatatatggctggtggccacgtgtggactctgttgtggaatatcaggaagactaggcaagggcgcctttatcaagcagatctgtcatttgtagtgagatatttactgccaaaactaccagtggaaaactgttggtttgcatggagtaacatcgagcggtttcaagcaagtctgttgagcgtgcccaatagagttcggtgtctgggtgagggaggagctatagctctaccctatctgccaagctcatcgggctccggcgacacagaggttaccgccgttgcaccaagtatggccggtaagagcacggatcgatttctttgccttattgactggttagtagagcaaggcatcgctaccgagcggcgatggctcacagctgataaaaaaagctacagatccttcttagggtcaagtggcggagtcctgcaagccaagaatgccctaatggtagctcgcagggagatggtactcgctcaccctttactgggatatcttcagcggggtggcaaaactgttgaagaaaacaataaagtagttgagttgttcaaaatcaacggttatgatccagaagatgcggcctggtacttcgccgcgtgggcgcagggagcctgggctaaacgcagagccctgtggctgtggggcccggccagcacaggtaaaaccctgttagctgcggctattgctcacctgagtccatcttacggctgtgtgaactggactaaccaaaatttcccttttaatgactgccactgtcagtcattggtgtggtgggaggaaggccgtatgactgagaacatagtagaggtagctaaggccatcttaggaggtgcgcctgtgcgtctcgatgtaaagaataaaggcagtgaagacttcattccaacatgtgtgatcataaccagcaacggcgacttgaccgttacggtggatggtcctgtaatcagcactgcccaccaggaggcgctgcaaacaagaataactatgtttcagctacagcgacttgtccccctgggattggctcccctgcccgaatcagatttgcatgactttttcaagtggggagctgatttgctgaagagcaaaggcgtgcccccagaggcctttagagtgccgcggcgagcggataggccacgtttgaatgacgtggcgaagactcccctaagcatcctggcttctgctgcggagtctcgcgagagctgggatagtgaagatgattggttcccgccatcgcagagccactctgctcctcgcagcgcgggtgcgctggctcctccaaatagcccggctacacccaacactccagaccctacgatctcgcagctggtctcggcgccgttcccatcttcggataccgaggacgaggaatatcaaaggtacctcgaggcgagggaagcagtggatctagagttgtggtgggctcgggtgttatttgacttggattgggccggacggcttaacctagtgggccctcgtggaccgcggcccgttggcttcttccactatcacctgtggctacaggaaccgtggaggtatcaccggcggctggcactgactgaagccgctcaccgtcgtcgcttccgagattggtataactggtgagtcttacggatgtcactatcttcttgcagtgggcggccttcggttgcgaaaacggacgtgggactgaaccccgcggagtaacattacgttctgttaacaggtaagaatgtcggccaccgactcttttcgaccgggcgggaaaatgccattggataccttgatgcggaagctcaccgtcagcgcgggaaccgaacctagccgttctcggtgggggttaccgggagggtatatcgctgacttgactgtgggcgtgcagtatgaaaaggcattcactgaactagctcgctatgcccgaagcctgcccctacagctttttcccgttaagcagctagcagaacagcttgtaaaaaagagaagagactctagtgacatacattttgttatgcgagtgtacatggatcttgtgcgtctcttgatcatggtggctccggaggctgttgcagaccggttaagaagagctaccgacggtgttagagaattttttcaagagccttcggctcaccagtatagcagagctccccgcttacctgtgctatatgacctgtatagatctgctcatgagggtaaagtgccttctaaagaagagattgatgcatttttcaatggtatgttgacgccgtttgattccgaccagcgaccggtggtcgagcagattcaccagcagttcttagacatctttcaccccccaccagtgcatggccatggcggaggtgtcgacactagcgacagtggtacaggaactactcccattggtgaaccagaccttgaacgacctcccgaagggcgatttctggtccccggttacaattatgttggtcctggtaatcctctggataatggtcccgctaagggaccagtggacgaggcagcgaaacatcatgacgaacggtacgatgaaatgttatcacatggggatgtcccatatatacacggacacggggctgacagactaatgaatagggagatagagcaagcggaggctgaggggcgtttaactgacccagtcgaccgggttttgggaaatgtcattcgagggctatggcaggcaaaggaaaccctgggcgatgttgctgatgttcaaatttcacaggttttaccccccgccccgcctggggagcggcccgatcaggactcttccgacggaccgcccagtcccaagcgggcgaggactggtatccctgacgaggctgttcctccgattactgaacctgctcagactctcccgcatactgatcccccgcctactgcaaccatggcatccaatcccgctggaggagctggtggtggagtaaaggttaaagctcaatggattggtggcacttccttcagcgactctgtgattctcactgcacacactcggacgtctatgttagctgatcgcggagggtatgttccagtgtatcaaaaaggcagccacacagatgagtctcaacctgtattgggcatgaaaaccccttatagctacattgatgttaatgccatttctgcccacctcacaccccgagattttcaacagttgttggacgagtacgatgagatacgccccaaaaaacttgtcataggcatctcagctatagtgattaaagatgttgccaccaataccactggtactactgtctcagacagtgccagtggcggcattacaattttcgctgatgatgcttatgagtacccttatgtattagggcataaccaggacaccctgcccggccacctaccgggagagaattatgtgctcccccaatatggctatctcacgaggggaagagagattgaaaagttaaatgatatcatagggatagctgatcataagacagaactatactttttggagcaccatgatgcgcagtgtctagggtccggggacacatggagccacgtgtatgatttccccgcggacctcccgtttaggcggctgagcactccgaaccaaacactgtatggccgccacaatcccattccagattcgagattagctatcatgactggtgtcgatcaggacggcaaagcggtatggaagcgtccgaagggaacagatgtaggtcgcttgcctttgaaccatgttcctggcccatctctaatgatgcccactgatactcagttacggaacatcacctttagaacacccgtagctatagggaatcctcagactagtgaccgtttctccattactccgctggttcatcagccatggtcagtgagaacagaaaatacagataatgggaattataccgttcacaactacttaggaggggtggcttacactcggcgactgcatgaggagtcatatgcaggacaccaggaagagagagacggaaccgtcgtgaacccgtctcgtgtcgttcagacagacactgatttggcagccccccatgtgggtcacactttctttgtgcctggccatctgcggattgcaggggaagctcaaaataccgtttacagtgctaagatgtatcaggagcctgtgtttcctttgtttcctggagcagtgtggaatccaaaccccttgtcttatgattgtcagatatggactaaaatccctgatactgagtgtcacttcttcgcgcagtatcctttgttaggtggttggggagtagctaaacctccaccgatgatatttcttaagttgagaagtcagccgggccctcccccagggggcgcacatacagtaccacagagtaatttaaatcagtatgcaatctttcacctgcattacagtatggagtttgaggttaagcgcaggaagcgttctagaagacacaatccagagaagcctgccccattccctaccacagctagtgggaggatgccttttgctttagctaatgatgagacgaatgtggatctcggtgtttatgaagtacctgaagatcaatggcttgcccaaaacttttcccataaactgtaatggcgcttaataaaaagcatgcataaaatatatgtgtgtctgagcctgattcttgatggcgaggtaggtgtggcgagggaagtaggcggcgcccggagcgctgattcagcactaatgcggaagtgacgtagcggaagtgaggtagcggaagcggaagtgaggtagcggaagcggaagtgtga

SEQ ID NO: 257 - DNA, 3780 bp, Parvovirus NIH-CQV
  source 1..3780: mol_type = genomic DNA; note = Parvovirus NIH-CQV - NC_022089
tatattcccctacttctctttctattccttttagtcatggcggcggcaaaaaccggtatatgaagtgagctcagtctgagtactgatctcacttcatataacggtttttgccgccgccatgactaaaaggaatagaaagagaagtaggggaatatactccgtattttattttgattactgaaacatatcggctaccatatcatcaacaatctcatccaactcccaatcttcaaacacgatcaagtcttccactgggatatcgttctcatccgcaactctctggaaacaatccaacaatccttggcgctccacgaaagtctggtcatccatccatgaagcgagcgcgctgttgaccaagtcataacgatgcatcatatccgcaacatccgtatccaacctgttcaccgctacacgcaacgtacgacactcacgctggtatccgtttctctgcgacgtcagcaaatccaccatcatttctaggcgacggatctcctctctgtagaagtccatcatggggtcgagtagtgcatcgtaaacgtggttcatcttgccggcagattgagaagtgagcaatggcaaaacaacccaaacacaacatccctctataagagaaaggatagatcctctataagagaaaggatacaggacacattaatataactcgagacacattaatataacttgggacacattaatataactcgagacacaataatataacacatgcgcagaacaaaacataacactcattatccaaatggcgacctccggcacattcgttcctttccaccacgtcgaccgcgagtgggatgcccgcttcaacgtaccaactcaagaagacctcgatgttatcgtcgcttccgtcaaggccgaagtccaagctggtcggttcaagtacgttctcgtctccggtgtcgaagttggctcgcgtcctttccaggatgactacctcatccgacatgttcacctcgcccttgtctacaataaccgagtcaccaagtcaagcattctcaaaaacctgggggtcaagcaaggaaatgggtattacctggtcccacgcaaacgcgagtttccttacagcggttggaaaaaacatcataccaagaccgaaaccaaagtggatgccgcttctctttgcctctacgagtacggaattctaccaaccgaccgtttggcagcagtggaatccgcgccccgttcagccgaagaaaagaaacgcaagcttgatgacatcatcgtcgaaatgcgccaactcatcgaggaaggccgtgaagaggagtcttttagaaagtttccacgaaaccacctaacgtatggagaaaaaatcaaggctatggtcatgcaaaagcgtgacttcttcaagagcaaaggagatcctcacatttggttgtttggaaaccctggatccggcaagtcagccattcttcaagtaatctacccagaatactacaacaagaacgtggagaaccgattcttcgatcgttatcttgacggtcaacactcccacgtgcttctacaagatgtcgaccataatgtcatggataatttgggcgttcaattctttaagagtgtgtgtgacgaagcgggctaccccatcgacgccaagtacaagaccccgcagatcgcgcgactcacgatcctcatctcgtccaacttcaccattgaggatgtcgttgcggaagagatcaaagggagacgcgaaaacgtcactgcgcttcaacgtcgattttggcaggtaaacattcgtgacttacttcctattctaggtgtcaagttgttgtccaagtatgagatcacccaactcaagaaggcgggtaacctcgacccacgcaagatcttcctcgcctacgactatcttcgtgatgttccaactggtttgccattggctaccgcggaagagtaccaaaaaatcatcaaggatcacttttacaaatagtcataattgaaatgccgaggttgcgatcaggaggttacaagaagagggaggaatacgtcgtacgtaggttaagagcagataactatgtacccaataaaggaatgacaatccatggatatgagtggtttggacctggtaatgaaataacctacaacccagcaaggaaccaagtggatcaagatggaaaagatcatgacctgacaaatgattacaagaagaagggggccttctacacttataacgcagctgacaagatactgttgcgtaaattggagaaagaacattccattcccgccaagattggcaaagcgtggtttggcacaaaacgatacctagcagaacatggatttctaccaactacagtgggatcaggtggagtttacgtaacgccacataaaaaacgtcgttttgaggcaccaaatatatcgggcaaaaagaggaagccagatccaagagaatttgcacagctgaaaagatcatcagtttcgaatacgccagctacagcaacaatggcgatgcaagtagacacaggaactcgtcgtcctatcggcaatgctaacgcacagggtctttcggaaacaccaatcgatgatgtgtacgatgttcaccgcggtcctccagattacacgttcgcaagtttaccgtacgcagcccaattgaactatgaagggggcgcgtatagtttggatacagttttccgcatgacttctcctaatgatgtgcgcgttgatactgggatcaccgattttaactcgggagcaggtgttgcacagatctccacggttcctagcgatcctgatgtggccaatgctcaagatattgcacgatggtgggattattatgctggaatctataagtactaccatgtacttggatgtcgttggcaccttacgtttgagaatttgtctaatgatctggtgtatctacacaagatgttttacaatgatgttttaccaaatcctggtgcaacaaacgaggatatgctgcaatggcgtgattgtgaatcacacctagtcggatcgcatgcagttggtgtcaatactgtaggtatcaacgcttttgagaatgaacctggtagtgggaatggagcgatgaaccttgagagttcggcagtgaatattaccactaactggaagacgggtgacaacgttgccagagtcaatggaccaagtcctattattcaactatcgggtgagtacaagccaggtgattttgatcgacaagttcgtttagatgcaaatgttgaaaattggacggatgttgtcgctctcgcaaagctgccagaacgacttttgctacgtgtgaagaacttcaacgacgggatcagcagcaacagcgcgaattcgttccagcggaatttcaaatttcgtttgagattttcagcagatttcttggtagagttcaaggagttgaaagacggactcaaatatccagtgcaacgacaaccattgacagtaactatcaataacaacacaaacttggtttaggatggtacttacacggagccaacgcgcgagaaccgggataactcaccaatcattgccacagcgtgcgagacgttggattaagcgttatcgtgatacagattgggctcgtagacatcgtattaaggatagacagcctaagacgaaccatgtgtcgggatacacccgtcgtacgtaaactacatatattactttcattctgaatatattcccctacttctctttctattccttttagtcatggcggcggcaaaaaccggtatatgaagtgagctcagtactcagactgagctcacttcatataccggtttttgccgccgccatgactaaaaggaatagaaagagaagtaggggaatata

SEQ ID NO: 258 - DNA, 5444 bp, Parvovirus YX-2010/CHN
  source 1..5444: mol_type = genomic DNA; note = Parvovirus YX-2010/CHN / Tetraparvovirus ungulate 3 - NC_038883
tttctagtcggaccggaagtcgccgaatgatgacgtagtttcacttccgccacactcaagatggcggcggttccggttccggtttccggtttccggtgagtcagcacttccgggtttggccacgcctccggatgtcgtcataccgagccgaccggaccgacaggataagtgtcgagaatgaggaagcgtgaggcattcttcgggtggacactgaagagtgaggaacacgtcatggcaggtgtcctctacctcggcgtgctcaagctgtaccggggcgacttggagcccgtgagatggctgcaaggagaccgtatggcgaacaggaacatgccggcacccgaagactggccgattgagcagctctgcgacaagtggggccgagaggtgttcaggttcctggtcagcgtcttcgagctgattgacgagacactgcaggtaacctacgacaattacttcagggagagaatctaccactttctgcaaatggagcccagcagccccgggaacccggcaccatttcaccttcatctcgcagtgagtcccccgcggcacaaaggcccgagggagatgggggggtggctgaagatgtttaggcaggctatgatagagcataggccaggcacggccccccccttgtactttgagatgaggaagaccgctcacggccgctggtgggaaggcgatcaggactttatcagatgttatctcgtgcctaagctcccccccggcgacgtgatctgggccagcacgtctatgcaggagtttgatgaagttgtcctctctgagccgaaaagaagagactatgcaggaccacttcctcttggagatgggagccaagacgctagacaggggagtcaggaagagcaccttgggcccaccgtgaaaggccgagcagcagatagattcttgcaggccgtagactggctggtagacaatggctgctgcactgaggccaagtggatcgagatggataagatgggatatcgttctttcatgtccacctctcaaggggtgctgcaagtgaagaacgctctgaaccttgcacgcagggaactcgtagcagggaacaaactgttggagagcatagtgaaaggtgctgacccctgggtacctggagttgtgaatgccgtagccaggctcttccacattaacggctatgacccagaacaggcagcctggtacctagctaattgggccaaggggggacatcaaaagaggagagccctctggctgttcggacccgctaacactggcaagacgctgttagccggcgcattcgccaaactagctccctgcttcggctgcgtgaattggaacaatgagaatttcccgttcagtgactgtgcctctcaatccctgatttggtgggaggaagggaagatgtctgagaagtttgtagaggccgctaaggccatactggggggcagcgagataaggattgacattaagggtaaaccttcagagcagtttatacctgctcccgtggtgatcacctctaacggtgacatgtgcaccgtgtactcgggcaatgtaatctccacagcccacgccgggcctctcaagagccgcatgctcaaggtcactttcagccatgtacttcctgggggtcccaatgctgacctccccccctgggtgctgcgggacctccccagcttcatggcttacgggcagaagctcctgaacgaaagaggaactccacccgaaatagatcaactggccgtagcagcggtagctccaccctgccaagtttcgaccacagcgccaaagatagaaagctccgcccttccgcccatacgggaggagagggacacctgggactcggaggaggagtggttccccgaccccccgcagaacactccaacgcgcatgccccgagagcgtcaaaagaaacgtcgcctcaccgagtactcagactctgagacggacgtcgaggaggaaccaaggtacggagctcctgcccgggaggctttggggtatctgttcctacccgagtgcaccagccgcagcacccggaggcaccagcctggaaagactctccagagagtactcagatcctgggaagccagacggtcctcggtgtctcggagcgagtcggcgtgcatcagagctcggcacaacgtagacaactggtactaccatatcccctgcctttcccttataggcagaagcgtccgaccgtcgaacacggtcttgcgaccttggcaagcgtggctctaacctcggactccgatctccttccaggtaagcggccatgagcgctgccgacgcgtggaagccgggtgaccggcccccgctggagaacctcatggatgccatggacagatccatttggggcaatagaagaaacaactctggcgggcggagagggatcaatgcccttctgaggcctggctatgacccgcgcatgcgccaggctctcttacagctttacaagttttttatctcaataaacaaacacggtggtttctgggataaaattaaggaggtggcgaagcaatggtggatggcgggacaccagacctccaagggagacgagctagcgcgaacagtgctcgatctgggaaggctctttatggcagtcgtagatgactatcgggaggacccagagatagatagcgtcaggcggagcatgatagattttctttacggggacaatgatgccacgagggctttctttggactacagcggttcgctgacaaggtccgtttacctcagagagatgtgatgagggtgtggattacgggcgggtatagacctcagcccccgaaaggaagtccctggggtacctgggcagagcttgacctagacatccgtaattccttagatgcctcctacaaggcagaagaggaagaccgtccgaaagagattcaggtcgctcgtatcgacaatcctgggtctgcagccggagagcgatctcggccggcacctgaagagaggcctgctgagagtgctgaggctgttggcccagggtctgatggacagtctggacgggctgatacgggggccgaacgggaacgagatcccacgtctaccgaagtgggaggatcagatggagcagagtcagatggaaaagggggaggactcaccctgcctggatataggtatgtagggcccggcaatcccttggatgcgggggagccgaggggacccgtagatgccatagctaagaaacacgatgagcggtacgacgagctcatcaagcatggccacataccctatattcacgggaggggggcggacagtctgatggggaaagagcttgcagatgccgaggaagcggggaagatactcgatcggtacgatcagttagtggcgaatgcggctagggggctgtggagagctaaggacacgttagcggatctcattggtggggagctggacaaagtcttaccgcccgatcctcccgtacagagcgagggggaggagtcccagaagagacctcgtgaggaggaggatcctccggagagcgccgactccgcccccaaagccccgcccgcccaaaaaccaagactagacgttccggagtacttctggacggaggaggaagagggcgccggagaggggtcgggagacgacgaggggggtgggattgtgcgcattaatataccaataaaaatgcagagtgccgacagcacccaacatcaacctcaaggtcatggggggggaccgagagcatccgggcattggcgcgcaggcaccgtgtttgggactcatggggtgacgaccactcagacgcgaatggtaatactgagccctaagactgactacaagccgctgttcctggacgctgacaccagtaaatctgactccgaaccaggcatggggttcctgacaccgtggcagtactttgattttaactgctacatgaaccactttaccccgtctgattggcaagagctagggagacgatacgactccattaggcccaaatccctgagtatatcagtggagaacgtggtgatcaaagacgtacatcagacgaacaacgagacaaacgtgcatgactccggaacaggtggcatcctgatattcgaagactccgagtacacctttccgtatgtcattgggcatgctcaagagggaaaccctggtgcactgagtattcagtggtacaaccctccccaatacgcctattttacgggttttaatcctattgcttgggaccatgcaaacggtacaattaagtatcaggtacatcctagcgcggacacggagttctttgttctggaggaacacgctgcccaaatactgcgcagcggtgatggtacctcctttacttacgagtttcccagtctcgaacctaagcgactgggcagccgtatgggcacgttgaacctccgtcataaccctgttctgcccagcagactggcgatttatttgggacaggatgggaacaatgcacctacattttatcagcctcaggggactgatttggacatatttcctcaggggtttataccgggcccaagaccgtgtctgccggtttccacacagctaagtgctagcagcgacttcgatgagatgtctgcgatcgcctacggtgatcgcactagtaatagtcggcactctctcatgccgtttaccagacagactacaaccatctccactcaaaactataatcgccagggggaggtagagagaaatgtacatttccaattgggtgatatggcctttgctcggtcctctgctgaagattctttttatgaaagatttgacgaggacaaagactaccgtaatcctggtggttacgtcaaaaaacctcgacctttggtgacagcagagagagaaggtcttggagaaagacctggagatgcccttatggtccccacctggggagcgaaattacctggcagcagtacaggacctggagccactaaaacggagaaagtttccctgccgttcattccccccatgcccggggcttgctgggacgagcgccccctctgttacgaggacgatatctggtgtaagaagccatacactgattgctctttcatgtctgagaaaaataatttcggtgcctgggcgctggtggatcctccgccccaagtgttttttcgtatgcagccgcaggtgggtccgccaccggcggacttggaccaacggacctttctgccgcctgctctgaaccagtatgccatgttcactgtgagctacactatggagtgggtgtgcgaaccgcggaagcacactagacggcataatttggaacctccgcctcccatgccttacacggagtccggcgaccccccgtttctccttactcgttcgcacgtttccaatgattaccctcgatattctttacctgtagaggcgtttcgcccagagggacgcgctcatcgtgtataaagaggtttcaataaagctttctcactctgcacccgaagaatgcctcacgcttcctcattctcgacacttatcctgtcggtccggtcggctccgg

SEQ ID NO: 259 - DNA, 5426 bp, Porcine parvovirus 2
  source 1..5426: mol_type = genomic DNA; note = Porcine parvovirus 2 / Tetraparvovirus ungulate 3 - NC_025965
gatggcggcggttccgcttccggtttccggtttccggtgagtcagcacttccggatttggccacgcctccggatgtcgtcataccgagccgaccggaccgacaggataagtgtcgagaataaggaagcgtgagtcattcttcgggtggaggttgaagagataggaactcgtcatggcaggtctcatgtacctcggcgtgctcaagctgtaccggggcgacctggagcccgtgagatggctgcaaggagaccgtatggcgaacaggaacatgccggcacccgaggactggccgattgagcagctctgcgacaagtggggccgcgaggtgttcaggttcctggtcagcgtcttcgagctgattgacgagacgctgcaggtaacctacgacaactacttcagggagagaatctaccactttctgcaaatggagcccagcagtcccgggaacccggcaccgtttcaccttcatctcgcagtgagtcccccgcgacacaaaggcccgagggagatgggggggtggctgaagatgttcagacaagcgatgatagcgcacaggccaggcacggccccccccttgtactttgagatgaggaagaccgctcacggccgctggtgggaaggcgatcaggactttatcagatgttatctggtgcctaagctcccccccggagacgtgatctgggccagcacgtctatgcaggagtttgatgaggttgtcctctcagagccgaaaagaagagactatgccggaccactccctctcggagatgggagccaagaccctagacagggaagtcaggaagagcacccggggcccaccgtgaaaggccgagcagcagatagattcttgcaggccgtagactggctggtagagaatggctgctgcaccgaggccaagtggatcgagatggacaagatgggataccgttctttcatgtccacctctcaaggggttctgcaagtgaagaacgctcttaaccttgcacgcagggaactcgtagcagggaacaaactgttggagagcatcgtaaaaggtgctgacccctggctacctggagttgtgaatgccgtagccaggctcttccacattaacggctacgacccagaacaggcagcctggtacctagctaattgggccaagggtggacatcagaagaggagagccctctggctgttcggtcccgctaacactggcaagacgctcttagccggtgccttcgccaaactagctccctgcttcggctgcgtgaattggaacaatgagaatttcccgttcagtgactgtgcctctcaatccctgatttggtgggaagaagggaagatgtctgagaagtttgtagaggccgctaaggccatccttggtggcagcgagataaggatcgacattaagggtaaaccctcagagcagtttataccggctcccgtggtaatcacctctaacggtgacatgtgcaccgtgtactcgggcaatgtcatctccacggcccacgccgggcctctcaagagccgcatgctcaaggtcactttcagccatgtacttcctgggggtcccaatgctgatctccccccctgggtgctgcgggacctccccagcttcatggcttacgggcagaagctcctgaacgaaagaggaactccacccgaaatagatcaactggccgttgcagcggcagctgcgccctgccaagtttcgaccacagcaccgaagatagaaaggtccgcccttccgcccatcagggcggagagggacacctgggactcggaggaggagtggttccccgaccccccgcagaatacgctaacgcgcatgccccgagagcgtcaaaagacacgtcgcctcaccgagtactcagactctgagacggacgtcgaggaggaaccaaggtacggagctcctgcccgggaggctttgggttacctgttcctgcccgagtgcactagccgggtgaccaggaggcaccagcctggaaagactctgcagagaatactcaggtcctgggacgccagacggtcctcggtggcccggagcgaggcggcttgcaccagagctcggcacgacgtagacaactggtactaccatattccctgcctttcccttataggcggaagcgtccgaccgtcgaacacggtcttgaggccttggcaagcgtggctctaacctcggactccgatctccttccaggtaagcggccatgagcgctgccgacgcgtggaagccgggtgaccggcccccgctggagaacctcatgaatgccatggacagatccatttggggcgatagaagaaacaactctggcgggcggagagggatcaatgcacttctgagggctggctatgacccccgcatgcggcaggctctgttacagctttacaagttttttatctcaataaagaaacaagggggattctgggataaaattaaggaggtggccaagcagtggtggatggcgggacaccagacctcgaagggagacgagctcgcacgaacagtgctcgatctgggaaggctctttatggccgtcgtagatgactatagggaggacccagagatagatagcgtcagaaggagcatgattgacttcctttacggggacaatgatgccactagggccttctttggactacagcggtttgctgacaaggtgcatttacctcagagagacgtgatgagagtgtggatcacgggcgggtatagaccgcagcccccgaaagggagtccttggggtacctgggcggagcttgacctagacattcgtaattccttagatgcctcctataaggcagaagaggaagaccgttcgaaagcgattcaggaccctcgtatcaacgatcctgggtctgaatcaggagagcaacctcagccggcacctgaagagaggcctgctgagagtgctgaggctgctggcccagggtctgatggacagtctggacgggctgatacgggggccggacgggagcgagattccccctctaccgaagtgggaggatcagatggaccagagtcagatggaaaagggggaggactcaccctgcctggatataggtatgtagggcccggcaatcccttggatgcgggggagccgaggggacccgtagatgccatagctaagaaacacgatgagcggtacgacgagctcatcaagcatggccacataccctatattcacgggaggggggcggacagtctgatggggaaagagcttgcagatgccgaggaagcggggaagatactcgataggtatgatcagttagtggcgaacgccgctagggggctgtggagggctaaggacacgttagcggatctcattggtggggagctggacaaggtcttaccgcccgatcctcccgtacagagcgagggggaggagtcccagaagagacctcgtgaggtggaggatcctccagagagcgccaactccgccccccaagtcccgcccgcccagaaaccaagactagacgttccggagtacttctggacggacgaggaagagggcgccggagaggggtcgggagacgacgaggggggtgggattgtgcgcattaatataccaataaaaatgcagagtgccgacagcacccaacagcaacctcaaggtcatggggggggaccgagagcatccgggcattggcgcgcaggcaccgtgtttgggactcatggggtgacgaccactcagacgcgaatggttatactgagccctaagactgactacaagcctctgttcctggacgctgacactagtaagtttgactctgaaccgggcatggggttcctgacaccgtggcagtactttgattttaactgctacatgaaccactttaccccgtccgattggcaagagctagggagacgatacgactccattaggcccaaatccctgactatatcagtagagaacgtggtgatcaaagacgtacatcagacgaacaacgagacaaacgtgcatgactccggaacaggtggcatcatgatattcgaagactccgagtacacctttccgtatgtcattgggcatgctcaagagggcaaccccggtgcactgagtattcagtggtacaaccctccccaatacgcctattttacaggttttaatcctattgcttgggaccatgcaaacggtaccactaagtatcgggtacatcctagtgcggacacggagttctttgttctagaagaacacgctgcccaaatcctgcgcagcggtgatggtacctcctttgcttacgagtttccaagtctcgaacctaagcgactgggcagccgtatgggcacgttgaacctccgtcataaccctgttctgcccagtagactggcgatttatttgggacaggatgggtccgatgcacctacattttatcagcctcaggggacggatctggatatatttcctcaggggtttataccgggcccaagaccttgtctgccggtttccacacagctaagagctagcagcgacttcgatgagatgtctgcgatcgcctacggtgatcccactagcaataatcggcactctctcatgccgtttaccagacaggctacaaccatctccactcaaaactataatcgccagggggaggtagagagaaatgtacatttccaattgggtgatatggcctttgctcggtcctctgctgaagattctttttatgaaaggtttgaggaggacaaagactaccgtaatcctggtggttacgtcaaaaaacctcgacccctggtgacagccgagagagaaggtcttggagaaagacctggagatgcccttatggtgcccacctggggagcgcacttacctggcagcagtacaggacctggaaccactaaaacggagaaagtttccctgccgttcattccccccatgcccggtgcttgctgggacgagcgccccctctgttacgaggacgatatctggtgtaagaaaccatacactgattgttccttcatgtctgagaagaataatctcggtgcctgggcgctggtggatcctccgccccaagtgttttttcgtatgcaaccgcaggtgggtccgccacctgcggacttggaccaacgaacctttctgccgcctgctttgaaccagtatgccatgttcactgtgagctacactatggagtgggtgtgcgaaccgcggaagcacacgagacggcataatttggaacctccgcctcccatgccttacacggagtccggcgaccccccgtttctccttactcgttcgcatgcttccaatgattaccctcgctattctttacctgtcgaggcgtttcgcccagagggacgcgcgcatcgtgtataaaacggtttcaataaaactttgtcactctgcacccgaagaatgactcacgcttccttattctcgacacttatcctgtcggtccggtcggctcggtatgacgacatccggaggcgtggccaaatccggaagtgctga

SEQ ID NO: 260 - DNA, 5049 bp, Pig-tailed macaque parvovirus
  source 1..5049: mol_type = genomic DNA; note = Pig-tailed macaque parvovirus / Erythroparvovirus primate 4 - NC_038542
tcacaggaagtcccgcccaccggcggcggcggcggcgctattgatttggtgtcgttctcaagggtttatgtttaaaaaaaggcgcgaaaacttatccgccattttgttgtttactagttttttattggctaatttaatttgcaacaatgcttttgattggttactgtaaatataaaagtgaaagtgcggaagtgaatcggtcattttcgctttgctttggtgcggacagcatctaacgctttgcgttcctggttctttacaggtaactaaccttacttatttactaacctttaacatggaaatgtttcggggtgttgtacatgtttctgctaactttattaactttgttaacgataattggtggtgttgtttttaccagttagaggaagatgactggccgcggctgcaaggctgggaaagacttatagctcacttaattgttaaagtagcaggagaatttgctgttccgggaggcagtactttagggctgcaatattttttacaagctgaacataaccactttgatgagggatttcatgtgcatgtagtagttgggggaccgtttgttactcccaggaatgtgtgtaatattgtagaaacaggctttaacaaagttttgagggaacttacagagcctacttatgaggtgtcttttaagcctgccatttctaagaaaggaaagtatgctagagatggatttgactttgtaacaaactatttaatgccaaaactgtatcctaatgttgtttactctgttacaaatttttcagagtatgagtatgtatgtaattctttagcttacagaaggaacatgcataaaaaagctttaacaaatactgcagatgaaggtgagggcaccagtacaaattcagagtggggaccagaaccaaaaaaacagaaaactggtaccgtgcgaggagaaaagtttgttagtttggttgactctttaatagagcgtggcatatttacagaaaacaagtggaagcaggtagattggcttaaagagtatgcctgtctcagtggaagtgtagcaggagtgcaccagattaaaacagctttaactttagctatttctaaatgtaattctccagaatatttgtgtgaattgttaactagacccagtactattaattttaacatcaaagaaaacagaatttgtaagatatttttacagaatgattatgatcctctgtatgctggtaaagtttttttagcttggcttggtaaagagttgggaaagcgtaataccatttggctttttggaccgcctactactggtaaaacaaatatagctatgagtcttgccactgcagtacccagttatggtatggttaattggaataatgaaaactttccttttaacgatgtgccgcataaatctattattttgtgggatgagggacttattaaaagtactgttgtggaagccgcaaaagccattttaggagggcaaaattgcagagtggatcaaaaaaataagggcagtgtagaagttcagggcactcccgttctgatcactagcaacaatgacatgactcgcgtggtgtcaggcaacactgttacgcttatccatcagagggcgctaaaggatcgcatggttgagtttgacttgactgtgagatgctctaatgcccttggattaattcccgctgaggaatgtaagcagtggttgttctggtcacagcatactccttgtgatgttttctcaaggtggaaggaagtctgtgagtttgttgcttggaaaagtgacagaacagggatttgctatgacttctcagaaaacgaagatcttccggggactcagacccctctgctgaacagcccagtgacctcgaagacatcagcattgaagaaaacgatagcggcattagcaactgcagcggttggaacattacagacctccctcacaaacaacaactgggagtcctctgaggatagcggttccccgccccgcagcagcaccccacttgcatctcctgagcgaggcgaagttccccccggacagcagtgggaactgaacacctcagtaaactctgtaaatgctttaaactggcctatgtatacagtggattgggtttggggatctaaggctcaaagacctgtgtgttgcttagagcatgatacagaaagttcagtgcattgttctttgtgcttaagtttagaggtgttgcctatgttaattgaaaacagtattaaccagcccgatgtaattaggtgctctgctcatgctgagtgtactaatccttttgatgtgcttacctgtaagaaatgtcgagagctgagtgcactgtggagttttgttaagtatgactgatgaaaaaccaaaagaaaaaaaatggtgggaaacaggggatccatttagagaagcttggtataatcaatttgttaaaatttttactgatttagtaggtaatgacttagacttagcagaaattctttggagacattatggcattaatttagataatccttttagtaatcctgctgctcttcctgacttggttaatcgcattaaaaaaaatttaaaagacaatcctgatatttacactgactccttaagtcatggcgctctcccagatttccgagaatctaaggctgagcatgagaagtctaatgaacctagaggagctgacgcaatccttactagtaaagacttacacgatgggggttcaattagtctcacattacccctcactcactatattgggcctgggaatcctttacaagctgggtccccaacggacgtggtggatgctgcagctaggattcacgattacaggtattctgaacttattaagttaggtattaatccttacactcactggacagtagcagacgatgagctgcttcataatgtacaaaatgtaggaggctttgaagctcaggtagtaaaagacttctttacactaaaaggtttattcacatctacagcccattttaaaggagagcttccaccggttcctagttactcagcaacagagcagtatcccaatatggcaacggtaacagcaacagaaggcacctcaggctccggtggcggtggatctaatccggtacacggtgtttggcgagagggggcagtgttctctgaagattctgtatcttgtacatttagtcgagtgtttgtagtgccttatgcagcagagcattcttatagagtgttttctccaccagctgaaaattgtcactctgctgctgctggggaatctagagtgtgtgctgtaagcccggtaatggggtatgcaactccatggcattacatagatgttaattgtgcatctttgtatttctcacccttagaatttcaaagacttttagaaaactatggaagtatcaagccatcttctatgtctgtcactctttctgaaatttgtgtaaaagatgttactgacaaacccggtgggggggttcaagttacagacagtactacagggagactatgtttcttagttgatgatacttaccaatacccatatgttctaggtcaaggacaagatacattagctcctgaactcccaatttggacatacttgctaccacaatatgcttaccttacagtaggagatgttaatacaaaaggaataacttctagctccagaaagcaacccactgaagaaacagcattttatgttctagaacattcaagctgcatgttgttaggtaccggctctagtatcagtacttcttacgcatttccagaactgccttatgaaagcttagagggagcagcacagcatttttatgaaatgtacaatcctttatactcttctcgcttagctgtgccttctgctttaggaggacaacctaaagtgcggtttgtacaacctacagatcatgccctgcaaccacaaaactttatgcctgggcctatggtaaacacagtaaccactaaagagggagattccagtaatacaggtgcagcaaaagcacttactgggttttcaacaggaacttcacaaaacacaagaatttcatttagacctggacccaactctcaaccttaccattactatgacgaagcagagcaaaaatatgttaatagcattgactccatcagtcacggagttactacttttggagataggcaaaaacctaatgaagcctcagaatcagtaggtagatatcccaatgataaagaacagcaaaaacaattacaagctttaaacataaaaacttattactccaataaaggagaccaaaaatatacagaggaaattaatagacctttaatggtaggtgcggtgtggaacagaagaagcttccattatgaaacacaattatggactaagctacctaatttagatgaaaactttatggcagaatttagtgccttaggaggttgggctttaaaaacaccaccacccatgatttttttaaaaatgcagcctgcaccaggtccagaaggctttagtggcattaccaacacgacattagcacagtatgctacaggaactttaactgtcactttaacattttctttaggtcctagaaaacacactggcagatggaatccacaaccagcagtataccctccccatgcagcgggacacttgccctatgtcctctatgaccctgaagtcacaaaaacctcccaaacacacagacacgggtatgaaaaaccggaggagttgtggtcagcaaagaaaagagtacaccccctttaagtattatatgtgtcctcttactagtcctcctcctaatatgtatggaatgttaacacctggagaacaacatcttattcagtgctttagattgtgtgctaaatacttagaaataaataatgtttaaaatacaaattagtctcaaatgtgtgttatttagaaacccttgagaacgacaccaaatcaatagcgccgccgccgccgccggtgggcgggacatccggttcaagatggccgccactgacgtcatatccggtcacgtgacctgtcaatcaaactacgtcacatccggcagccgagttccggtctgggacttggcctggagccaaccctaggggtttcgttggaagcggggactaagggttatcgagtacttatgtagaccccg

SEQ ID NO: 261 - DNA, 5275 bp, Porcine bocavirus
  source 1..5275: mol_type = genomic DNA; note = Porcine bocavirus - NC_023673
cccacacaaggaaataagtatcggaaaaataggggttggctggagataatgatagacacgccttttcgggcacagccaatcacagcgatggggtgatttgacgtggctgattctgataggctggaggactctatataaggagagcaaccaggaaatagagttcattctgcggctggacgcggagctgttcacatcgatgcagaaagagcgcgtgagacactacaccttcttctattgatgtacattctgcctgagaagagactactacagtctgtggacatcgctccgcgggagaagacgtcctgtgaaggtatattatggctgctggcatggcttctgctagagttgggctgtctgatcaggaatggctgggtttttggcacggagctattactggtttcaaggctcccagctttagctatgttattagaattgatatcaaggactggagactggctgagagagctattatggacatatattctaaagatatgcctgtcattctggatgatctggtagatcaggagaaggagcttctgctctgcgacgtcaattataactggaaggagagtctggccatgaagctccagaatcagcacgggctcggtcagacgctctgtgaggctgctgacatggccgcgaagcggctctttcagctgaagcagcagagtcacaatccagtctacagctgcttcactcaggctgagatcggcgagatctatatgcacgttcatgtagtgtgcggaggagacgggctgaccaagtgcaacgctaaaaaaagcgcttgggttctggctaaatacttctggagctatatgctcgatctctggaagcactacgagagttgcttcgatccgaccaatctgcagtacaccgtgtcggtgcagctgcgtctactctgtgagagggtcagggctcatcaggacgcgaccgtctcttgcttgacctatcgagaccggcacaacgaggctcacgctcagcgcatcgatgcttgcagctacattatgaactatctcttgccgaagaatagacagctggtgacttggctggatcctgatgtctgcactccgagcgtagctcgctttgaaaccaccaaaacctacatgtgcagtcaccttgacagacagccgatcactcactatctcagaaaggctctccatgaccggctggtcatgaacagttctgatgagacgggggaacctgtccataagatgccgcgctggggcgatcttcctgcggtaggtgaaaactccttagctagacaggcagggccgacaaggccgactaaactgacgagaaaacagcatgtcatgttagatactctgcagagatgtcaggaagagtttatctgtaccaaggaagagttaacgatgctgcatccagatctagtgattatgtttgagagtactccgagcgggtctcgaacgctcgaagaagtactcgagatgcatcgggtgagaatcactagaaccgagacggctctgagttacattaaaaggcagtttccagacaacagatttatcaagccggagaataaggtggtcaggctgttgaacatccagggctacaatcctatacaggtcgaccactggatggcgaccgtgctctctaagaaagccgggaaacagaacacgatctgtttctttggtccggccagtacggggaagaccaatctggctaaggcgctcgcgagcgcggtgaaggtctatggttgtgtcaatcacctcaacaagcagtttgtctttaacgattgccagaacaagctcgtatgctggtgggaggaggcggtcatgcacaacgattatgtagagccagctaaatgtctgatggggggaacgacctttagggtagatagaaaacaccgagatagcgcggaacagcctcaaacacctttgctcatcagcaccaatcatgacatctacacagtggtgggtgggaacacagtgactaccgttcatgagaaaccgatccgagatagagtagttcagttcaatttcatgaaagcgctgcctcagaactttggagagatctcggtgactgaagtggctgattggctcggctggtgcgccgaggactttgactgcacgctcgacgggttcaagaaagagtgggagcttgaccgtgttcccaacagctttcctttagctgtctactgtgatggtcattcacaggattttgtgctctacgctcaaggaccttgccgtcgctgtggtggctacctgcctcatactactaccagcgacggtgattggagcgagtctgctgctgcaggtaggacttggcgcatgcgcgatagggagacacctatcgggcggggagggatgtgctcatgatctgttctttgtctttcagagcctactccggcagagtctccaaagaaagtgaccgctactcaaggcactcagaccgagcctgaaccttcttcttcaagtgagtacatcgactggagcagctgtccaaccaatgagtcagagattcagcgatacaacatctcgcagcgggaagagcaacctccggttctctccttactcgacgatccaggcgaaggaccgtcgagtcaacgagaggtctacaaccgagagggagcatggaacgtcttcgcgggagccagtggagacggagaccaagccgggatcctcgtcacagtggaccgcttcctgcgggagggggaggaagggcacatcgaccccgggttctggctcagctgtggggagctcttggaagagccgcaagatggttaagaaggctaatccggccacagtcttcagtgagcacaaaaagagggagggaatcgagttcgacttctgtgggttttactatcactccacaagaattgcatccaagggaactagatacatttttgacatggcgaaaaaagactttcagtctgtcgccaaacaaaattgtgtcacctgggaccagcaccgagaattactatttacttttaaacggtgtctggacaatatgtaccgatctataatgtatcactttaaattcactgaatgtcaaaagtgtccttactgggatgatgtctataaacagcatttagcgggtgtgcaacctattgaaactgttcctccttcttctgtagagctcacagacgtggaaatgctagaggctgttgaatcaatgaatgagtcttaagcgcggtcagttccgcgggcttctatttcctggttataattatttgggtccttttaatcctttggaaaacggtgatcctgtcaataaagccgacgaggccgcaaaaaaacacgatcaagcctataataattatatcaataaaggtttaaatccctacctgaaatttaataaaggtgatcaagactttatcgactctttgcagtctgactcttctgtgggcggtaactttgcgcatgccgtctttcacttgaaaaaacaaattgcgcctgcgctcaacgagcctaaagacacgggggaacctccggccaaaaaggacaaacgcgcgggcaataaacgtcacctatactttgcgcgcttgaataaaggcgcgaaaaaagccaaagctgatcctaacaacatggatggtgatatggataataatgaacaaggggcgggtgaggcgccagctgctgaaggcggagcaagagctgctggcggcgctggcggcggtggtggaggaggcccgagcgggaatcacggcgtcggcatctccaccggaggatggatcggaggatccatcttagggcaaaatagaatcatcaccaagaacacacgtcaatggtggtgtcctatccgcaatgaacataaatacaagcgataccaaggaatcgccgattataaaatggaaggctataccacaccttggaacatgttcaacttcaatcaatacagcagccattttaatcccaatgaatggcaatggctcctgaaccgagccgcgcgcttcaagcccgtcaaaatggaaatcaaaatctacaacctgcaaatcaaacaagaaagcaaccaagacacaactgcgcaatacaccaacgatctgacggcgggtctccacgtcctttgcgacggagaacacgcctttccttggacgcagctgccgtgggacaagggctgcatgccggagctgcctcacgacatctggacgctacagcaatatgcctacatcacgtgcgcctctgaagcgcaggacacgacgagcaacggaaacgagctcaacatacgaggcgccgtgcccatgtatctcctggaggagacggatcacgccgtcatccgcacgggcgagagcatcgccttccatcactcgttcgactgcgggtgggtcgacaacacacgctcgagcgtcatgcctcagatggcctgcatcaatccgctcatcgactccagactcgtcggggtctggctcaaccaggccggaaacgggacgaacgaggaccagatgagaccgtatcaaaaacacggtccgtggtggccgggacccggataccgaaacaatagaaacaccagcgagaacggaaccaacggacataccgtcctgggaccttacatcacggcctggaaaccagagggaatgacctaccagtcgtccgctgtcagattcggagcggccacgggtccgtacacgggaggccagtcgaccgatgtcgtgacaggcaacgccaacaacaacgccaacgttacgagattcacaccgggagacggactgggcggagcgaacaataacaactactttatccagcgaagttccgtccagacgggaaccagggatcaggctctctataaagccacgggtcaatccacacaggagatagaaaatgtctacatgatgccgaaccaggtgtgggactcggcgcagatctccaggtacaatcccatctggaccaagatacccagggtggacagacataccttgctcgataccgaggacgggaccttaccgatgacgcatcctccgggaaccatctacgtcaaattggctcacattccaacaccacagtcgggtaacaattcttaccttaacatttacgcaacgggacaagtctcctgcgaaattgaatgggaatttgaagaaaactttaccaagaattggcgtccagagcgcatgatcgacggcaacaagatgagagccgacgtctacaaaatcaacgccgatggaggatgcgtcttacccaacagctactacgaaaccatgccaaccagatgggggagggaaaaggttctgtaacctttgctctgtatgcatattcaataaagctcatatgcagatcagaaacagactgcatgttgacactttaatttttatgtgggtggtgatggg

SEQ ID NO: 262 - DNA, 5153 bp, Porcine bocavirus 1 pig/ZJD/China/2006
  source 1..5153: mol_type = genomic DNA; note = Porcine bocavirus 1 pig/ZJD/China/2006 / Bocaparvovirus ungulate 2 - NC_024453
gatagagccatatagatgtgaaattattaacttttgtgtaaatgttaagagaataattaaccttgagcggggatataagagctgaaatcgaaagcgctggagtcactgcgagcctggctgccagcggggacgacgttgggtgagtgcgatggagtgcttcgctctgggagaatacgctacctatgaggactttctgggctttcgggatccagcatacacctatatcatacgtctgccttttagagactggcggggactagagaatgtgcttcagcacgcctgcactccagctcagtatagagagctgctggacgtggatgattctgggcatactgtgtttgatgatgctccagacaatacagacactgctgctcttctgcattttctggccaggaacgggcctcaatggcattatggaagatttctcatacactgtgcgcgtcaggcggtcgagtgggagttcagaaacaagcagggcagacaggatccggagttcagctgcttctgtcagctcgagctcagcgacacgatgcacatccatctcgtcctcggggggccggggctcaacaaatacaacgcgaaagcttggaggaatgtgatagcccaccggttctttaactacatgctagatggaatcaaacagaacctggggcatctggatgctgtggagtatcagaacatcatccatcctctagtcagggcgaggaacagctgcgtgctggactacaccgagtgctgcagcatcctgcagtataagagcaggcggggggatatgtacgcgcgccgggtggacgggaaagagttcatcgtcaactacctgctctgtaagaacctgaagtacaaccagcacgtagatcctcagaccatcactccgatcggggctcacttcatcgaggcgaccaagtcctacgccatcagcagcatcgacgggaagctagttcctgagcacatgcgcagacagatctttgagaggctgaggagggtcacggacaggtctctggagccggtcttcgggggagatccctacggagacctgcctcaggtagagagatcggagtgggtgcagaccgcgagcggaggggggaggatgaccaagagagggggtctgatgctcgattgcatgagacgctgtttcactgaaaacatcacctcgtacgaggagatggtgagagagtgtccagatctgacaatcatgatcgagagccaggcggggggcagcaggctgatagagcaggtgatgggcatgacacacatcaagatcgtgcagagctacaccgcgctgggatacgtccagaaactgttcggggaaaaggcgacattggagaacgacaaccgggtgttcagactcctgaacttccagggatacaatccctggcaggcgggacattgggtgtgctgcgtgctggacaagaagagcggaaaacagaacacgctctgcttctacggaccggccagcacggggaagaccaatctggccaagagcatcgtgcaggcctgcaagctatacggctgcgtgaaccatcaaaacaagaacttcgtcttcaacgactgcgcggccaagctgatcgtgtggtgggaagaagcgctgatgcacaatgactgggtggaacaggccaagtgcatcctgggaggaaccgagttcaggatcgaccgaaagaaccgggactctatgctgttgccgaagacgccggtggtcatctcgagcaacaacgacctgtacaccgtagtgggaggcaacacggtgtctcaggtccacagcaggcctctgcgagagaggatcgtacagtggaacttcatgaagatgctggaaccgacgttcggggagatcactccggaagagactgctgcgtggctcttggcctgcagagagcgcttcgactgcacgctggagggattctacagagagtgggacctgcaggtaacgccaaacgtgtttcccatcggtaacctgtgtccctctcattcgcaggactggacgctgcatgagcgtggcttttgttctgcgtgtggcggctattatcctctggagactcgcgaagacgatctctttagcctgcgaggggagcacgacggtgagtggacgagggaggacggcctgttctgggagggcgtggtggaacgtctctctgacagtatctctcgcctgcagaaactggtgaggggagcgaacagcctgaggagagccgcggacgaaagagacgggcatcgaccgaagagggaaaagaacctcagccagccaaaagacgaagcgagcgtctaggtaagaagccgagagtcaccttctacgagcccgtgagcagcgacgaggacgagttcgacagtcagcctcaggatgagctcagcgagatccgacacagacacaggcaggagagggaagcggtcgaggagccggtcgaggagccgcgaccgggaccaagcaccggggctgcctccgaaaaaaagggactatcgccgtcggagtggggagagaggctcggagtcctcaccagatcgctcgacgagggggagcccatcgtgctccactgcttcgagaacatcccgagtgacttcagcgacatggaggagaccgaatgactctcgggacggggggaaaatatggggaaataaaaataaaaagaataaaacaaacccttacgaggtattcagccagcacatggccaggttcaagccagataaaagctattgtggcttctactggcacagctgccggatggctcgtaagggcacagattatatctttaccgagggaatgagggatttccaaaaacgctgtaaagacaataaatgtgagtggaaagatgtcagggagatcatgttcggcctcaaaaaggtcttagatcagggatatagaaatatgatgtatcactttagacatacccagtgtgagaaatgtaactactgggatgaagtgtataaaatgcacctggctaacgtgtctccttctgaaacagaaccgcaggaactgacagacgaggagatattagccgcggccatggaggtcgatggcacccacgaatagaaaaccgggagggtgggtgctgccgggacatagatacttgggtccgttcaacccaatagagaacggagagcctgtgaacgcggcagacgcggcagccaggagacacgatctgaaatacgatcagtacctgaaagagggaaagaatccctatctgtatttcaataaagccgattctgattttctcgaagatctcgtgttcgatcgttctttcggcgggtggatcggaaagggcgtgtttggactcaaacgagcgatcgcaccgacgctcgacgagtcctcgggaaaacagaacacggggggaccttcggcggccaagaagccgagggtcgatcctcagagagcgcagaagcgcaagctctactttgccagacaggcaaaggaggccaagaaacaaaagatgagctcgggaggtgatcccagcgaagacacgggggcgggagacggagagcaggggggagaatcttcggccatggcgggacgctccggaggaggaatgggaggcggtggaggaggaggcggcagcgtgggattcagcaccggagggtgggaagggggcacctacttcagcgatcacaccgtgaccacgaccaacaccaggcagtggtacacggggatcctgaacgggcatcgctactcgaagctcgcccagactacagggagcaatctacaggcagcaaagccatgggtggggatccagacgccgtgggcctacctgaacctcaactgctatcactgccacttcagtcctcaggactggcagaggctcctgaacgaatacaaggcctggcggccaaagaggatgcacgtgcgcatctacaacctgcagatcaaacagatcaccactgtgggagcggacacgctctaccagaacgatctgaccgcgggggtgcacatcttctgcgacgggagccatcagtacccgtacgcgcagcatccttgggacgagggggcgtcacctgagcttccgaacgagatctggaagctgccgcagtacgcctacttccagtatcagggagatctgaccgatcacgcaacagcaaatacgccacagaacgtggaaagcatgctgcgatccaacataccgctgttcctgctggagaacagcaaccacgaggtgctgagaaccggagagatgaccgagttcagcttcaccttccagtccgggtgggtcaccaacgacagagcatactgctgtccgcaatccgacttcaatccgctcgtgcaaacgaggagatactacccgacgtggaacggctcatcgaactcatactcgtataatagatacggaccctacaaaaaaccgagcaactggatgccgggaccgggactggcctacaagggcgctacacacacaaatcagaatccagatgatgcgagagggccgatcgtgaccacgatcgctccgagaggaacgatctctgtcgggtctacaccatcaaacgacgctccgaacgatggtgataacaccatatcttcggacggcgtcaaacagggcggttggcagacggcaccggtgaacggagcctgcagcagaacagactatcccacgctcgccttcgatccgagcgataggtccactaaccaaaacataccgaccagaaacctagacatagacatgacacggtggtatcgtgtacacgaaccggtcagaagcggaaacggaagcacctactacaacgtggatgatgtctggatgtatccaaaccaagtatggaactccacgccgatctgcagagacaaccctatctgggacaaggtgccgaggacggaccatcacacgctgctggattcctctgacggaacactgccgatgaaacatccaccgggaaacatcttcattaagtgtgcaaagattccgattccgacgagcaacaataccgacagctatctgaacatctacgtgacgggacaagtcacctacacagtcgaatgggaagtgcaacggtaccagaccaagaactggagaccagaactcagaacatccgccgggacctacaatcaacacgagatctacaacatcggggagaacggaacgtacaacagggccaacaccttcaacgaatgcatgccaactaagtgcggaattaatcgtgtattgtaaaattcaatgtacaacaaaatcaagaaaaaccca

SEQ ID NO: 263 - DNA, 5278 bp, Porcine bocavirus 3
  source 1..5278: mol_type = genomic DNA; note = Porcine bocavirus 3 / Bocaparvovirus ungulate 5 - NC_016031
cccacacaaggaaataagtatcgaaaaaatagggataggcgggagataatgatagacacgccttttcgggcacagccaatcagggatatgaggtgatatgacgtcaagacacctgattgggtgggagggtctatataaggagagaaccaggaagagtgagctcattctgctccgggacatcgaggtgttcacatcgatgaggaggagacctctcagcgccatcttgattctctgaatgctgattctgcctgagaagagactgctacagtctatagacatcgctccgcgggagaagccagctccggcaagtatcctcttatatctgctagcatggcttctcttggagttgggctgtctgatcaggaatggcttagttattggcacggagctattactggtttcaagaatcccagctttagttatgtcatcagaattgatattaaggattggagagtcgctgagcgtgccattatggacattttttctaaagatctaccgtccatcttggatgatctggtagattctgagaaggaatttctgctctgcgacgtcaactatgactggaaaggcagtctgagcatgaagctcaagaatcatcacgggctcggtcaggtcctctgtgaggctggggacatggccgcgaagcggctgttccagctgaagcagcagagtcacaatccggtctacagctgcttcactcaggccgagataggtgacacctatatgcacgtccatctggtgctgggaggagacgggctgaccaagtgcaacgctaaaaaaagcgcttgggtcctggctaaatacttctggaattatatgctcgatctctggaagcactacgagagctgtcacgatccgaccaatatgcagtacaccgtctcggtgcagctgcgtctgctctgcgagagggtcagggctcatcaggacgcgaccgtcacctgtctgacctatcgagaccggcacaacgagtctcacgctcagcgcatcgacgcttgcagcttcatcaccaactatctcttgccgaagaatagatcgctgtgtacctggctgggtccagatatctgcactccgagcgtagctcagtttgagtccaacaagacctacatgtgcagtcacattgacaggcagccgatcactcactatctcagaaaggctctctatgaccggctggtcatgaacagcgccgaggagacaggggaacctgtccataaggcggcgcgctggagcgatctgccggaggtgggtgagaactcgctggctagacagaacactcagacgagaccgactaagctgacgaggaaacagcatgtcatgttagatacactgcagagatgtcaggaggagtttatctgtaccaaggaagagttaactatgctacatccagatctagtgattatgtttgagagtactccgagcgggtctcgaacgctcgaagaggtgctcgagatgcatcgggtgagaatcactagaacagagacggctctaagttacattagacggcagtttccagacagcaagtttatcaagccggagaataaggtggtcaggcttttgaacatccagggctacaatcctatacaggtcggccactgggtggcgaccgtgctctctaaaaaggccgggaaacagaacacgatctgtttctttggtccggccagtacggggaagaccaacttagctaaagcgatcgcgaatgcggtcaaggtgtatggttgtgtcaatcacctcaacaagagcttcgtctttaacgattgccagaacaaactcatatgttggtgggaggaggcggtgatgcacaacgattgggtagagccggctaagtgtctgatgggaggaacgagcttcagggtagataggaaacacaaggatagcgcggagcagcctcacacacctttgatcctgagtaccaatcatgacatttacacggtggtgggtgggaacacagtgactaccgttcatgagaagccgattagagatagagtagttcaattcaatttcatgaaaacgctgcctcagaactttggagagatttctgtggctgatgtggctgactggctcggctggtgcgccgaggactttgactgcagtctcgacgggttcaagaaggaatgggagcttgaccgtgttcccaacagttttcctctagcgagctactgtgatggtcatttgcaggattttgtgctctacgctcaaggaccttgttgtcgctgtggtggttacctgcctcacactactaccagcgacggtgattggagcgagcctgctgctgaaggtacgccttggcgcatgcgcgatagggagacacctatcgggcggggagggatgtgctcatgatctgttctttgtcttgcagagcctactccggcaaagtctccaaagaaagtgaccgctactcagggcactcagaccgacgattcttcgagtgagtacatcgactggagcagtcaaccagggaatgagtcagagattctccgatacaacatctcgcagcgggaagagcaacctccggttctctccttactcgacgatccaggcgagggaacgtcgagtcaacgagaggtctacagccgagagggagcatggaacgtcttcgcgggacacagcggagatggaggccagaccgggatcctcgtcgcagtcgaccgagtcctgcgggagggggaggaagggatcatcgaccccgggttctggctcagctgtggcgagctcttggaagagccgcaagatggttaagagagctaatccggccgtcgtcttcagtgagcacaaaaagagggaggggatcagtttcgactactgtgggttttactatcactccacaagaattgcaggcaagggaactaggtacatttttgacgtggcgaaaagggactttcaggctgtcgcccggggaaattgcattacctgggaccaacatagagaattactatttacgtataaacgatgcttggatactatgtaccgatctatgatgtatcactttagattcactgagtgtcagaaatgtctgtactgggatgatttctatagacagcacttggcgggtgtcactcctcctgaaactgttcctccttcttctgtagagctcacagacgtggaaatgctagaagctgttgaatcaatgaatgagtcttaagcgcggtcagttccgcggtgttctgtttcctggttataattatttgggtccttttaatcctttggaaaacggtgatcctgtcaataaagccgacgaggccgcaaaaaaacacgatcaagcttataataattatatcaataaaggtttaaatccctacctgaaatttaataaaggtgatcaagactttatcgactctttgcagtctgactcttctgtgggcggtaactttgcgcgtgccgtctttcatttgaaaaaacaaattgcgcctgcgctcaacgagcctaaagacacgggggaacctccggcgaaaaaggacaaacgcgcgggcaataaacgtcacctgtactttgcgcgcttgaataaaggcgcgaaaaagagcaaagctgataatactgacatggatggggacatggataataatgaacaaggggcgggtgaggcgccagctgctgcaggcggagagagagctgctggcggcgctggcgcgattggtggaggaggaggcggcaacaaccacggcgtcggcatctccaccggaggatggatcggaggatccatcttgggcaacaataaaatcatcaccaagaacacacgtcaatggtggtgtcctatccgcaatgaacacaaatacaaacggtacacacaatggcatcaatcaggcaccgattataaaatggaaggctataccacaccttggaacatgttcaactttaaccaatacagcagccattttaatcccaacgaatggcaatggctcgtgaaccgagcctcacgcttcagacctgtaaaaatggaaatcaaaatctacaacctgcaaatcaaacaagagagcactcaagaccaaacagcgcaatataccaacgatctcacggcgggtcttcacgtcctctgcgacggggaacacgcctttccttggacgcagctaccctgggacaagggatgcatgccagaattacctcatgacatctgggaactgccgcaatacgcctacatcaccatgccgtcgcaggcacaagatacagataacgctgaagaacgcgctttccgatgcgccgtgcctatgtatctcttagaagaaacagatcactctgtcattcgaacgggcgaaagcgtcatctttcatcattcttttgactgcggctgggtcaataacacacgctgcagcaacatgcctcaattggcctttaccaatccgctcatcgattctcgactcgtcaagacgcgatacacctctggacattccggggcgctgacagaagaacaatgtagatcttaccaaaaaaatcctccgtggtggccgggtccgggatggagaaccaatacaaccactaatgggcaaaacaataacaccatcctaggacctttctcgacgacgctaagtccagcaggcatgacctatcaaacaggtcccatcagttacggcgcagctacgggtccgtacgtaggaggtcaaacggcagaaccaacgaaccaagcagccaacaataacaactatctgaaattcacacctggagacggtaccggtggactgaatcaaggtaatgccttcatccgaagagaatccgtccttacgggaaccagagaccagaaactctatcaggccaatggccaaaacgtcacagaacaacaaaacgttttcatgatgccgaaccaagtctgggactcggcacaaatctccagatataatcccatctgggtcaaaacgcctcgagtagataggcacaccatgatcgataccgaagatggaaccttgccgatgtcgcatcctccgggaaccatctacgtcaagctggctcacattccgactccacaatcgggtaacaactcttacctgaacatctacgccacggggcaagtctcctgcgagattgaatgggagtatgaagagcactttaacaagaattggcggccagagcgcagaatcgacgcacagcacatgcgcgcagacgcctacaaagtcgacgccaacggggtctacaatctgcctcagtcttattatgaaaccatgccaaccaggtgggggcaggaaaaggttctgtaacctttgtactctgtatcctttattcaaatcaataaagctcatatgcagatttcaaaaagactgcatgttgactatttaatttttatgtgggtggtgatggg

SEQ ID NO: 264 - DNA, 5177 bp, Porcine bocavirus 4-1
  source 1..5177: mol_type = genomic DNA; note = Porcine bocavirus 4-1 / Bocaparvovirus ungulate 5 - NC_016032
ggatatgccgtcaagagacctgattgggcaggaggggctatataaggagggaactaggaagagagagctcattcttcggcgagacacggacctgtgcacatcgctgaatgaagagacctatttggcagcacatcatctgatgtacattctgcctgaaaagaggctacagtctgagctcatcgctccgcgggagaagacagctccggcaagtatcctcttatatctgctggcatggcttctcttggagttgggctgtctgatcaggaatggcttggttattggcacggagctattactggtttcaagaatcccagctttagttatgtcatcagaattgatcttaaggattggagaagctctgagcgtgccattatggacattttttctaaagatctaccggccatcattgatgacattgtagattctgaaaaggagatgttactctgcgatctcaattatgactggaagggcagtctgagcatgaagctcaagaatcagcacagtctcggtcaggtcctctgtgaggctggggacatcgccgtcaaacggctgttccagttgaagcagcagaatcacaatccggtctacagctgcttctctcaggcagagataggagacacctatatgcacgtccatctggtgtgcggaggagacgggctgaccaagtgcaacgctaaaaaatgcacttgggttctggctaaatatttctggaattatatgctcgatctctggaagcactacgagagctgccacgatccaaccaatatgcagtacgccgtctcggtgcaactgcgcgtgctctgtgagagggtcaaggctcatcaggacgcgaccgttacctgtctgacctatcgagacaggcacaacgagtctcacgctcagcgcatcgacgcttccagcttcatcaccaactatctcttgccgaagaatagatcgctgtgtacctggctgggtccagatatctgcactccgagcgtagctcagtttgagaccaacaagacctacatgtgcagtcacattgacaggcagccgatcactcactatctcaggaaggctctctatgaccggctggtcatgaacagcgccgaggagacaggggaacctgtccataaggcggcgcgctggagcgatctgcctgaggtgggtgagaactcgctggctagacagaatacagccactaggccgactaagctgacgagaaagcaacatgtcatgttagatacactgcagagatgtcaggaggagtttatctgtaccaaggaagagttaactatgctacatccagatctagtgattatgtttgagagtactccgagcgggtctcgaacactcgaagaggtgctcgagatgcatcgggtgagggtgactaggacagagacagctctgagttatgtcaggcggcaatttccagacaacaagtttatcaagccggagaataaggtagtcaggcttttaaacatccagggctacaacgctatccaggtcggccactgggtggcgaccgtgctttctaagaaggccgggaaacaaaacaccatctgtttctttggtccggcaagtacggggaagactaatctagctaaagctatcgcgaacgcggtgaaagtgtatggttgtgtcaatcacctcaacaagagttttgtctttaacgattgccagaacaaactcttgtgctggtgggaggaggcggtgatgcacaacgattgggtggaaccagccaagtgtctgatgggagggacgagcttcagggtagataggaaacacaaggatagcgcggagcagcctcaaacacctttaatcctgagtaccaatcatgacatttacaccgtggtgggtgggaacactgtctctaccgttcatgagaagccgatccgggatagagtagttcagttcaatttcatgaaaacgctgcctcagaactttggagagatttcagtggctgatgtggctgactggctcggctggtgcgccgaggactttgactgcagtctcgacgggttcaagaaggaatgggagcttgaccgtgttcccaacagttttcctctagcgagctactgtgatggtcatttgcaggattttgtgctctacgctcaaggaccttgttgtcgctgtggtggttacctgcctcacactactaccagcgacggtgattggagcgagcctgctgctgaaggtatgccttggcgcatgcgcgatagggagacacctatcgggcggggagggatgtgctcatgatctgttctttgtctttcagagcctactccggcagagtctccaaagaaagtgaccgctactcagggcactcagaccgacgaaccttcttcgagtgagtacatcgactggagcagtcaaccagggaatgagtcagagattctccgatacaacatctcgcagcgggaagagcaacctccggttctctccttactcgacgatccaggcgagggaacgtcgagtcaacgagaggtctacagccgagagggagcatggaacgtcttcgcgggacacagcggagatggaggccagaccgggatcctcgtcgcagtcgaccgagtcctacgggagggggaggaagggatcatcgaccccgggttctggctcagctgtggcgagctcttggaagagccgcaagatggctaagagagctaatccggccgtcgtcttcagtgagcacaaaaagagggaggggatcggtttcgacttctgtgggttttactatcactccacaagaattgcagccaagggaactaggtacatttttgacgtggcgaaaagggactttcaggctgtcgcccggggaaattgcattacctgggaccaacatagagaattactatttacttataaacgatgtctggacactatgtaccgatctatgatgtatcactttagattcactgagtgtcagaaatgtctgtactgggatgatttctatagacagcacttggcgggtgtcactcctcctgaaactgttcctccttcttctgtagagctcacagacgtggaaatgttagaagctgttgaatcaatgaatgagtcttaagcgcggtcagttccgcgggcttctgtttcctggttataattatttgggtccttttaatcctttggaaaacggtgatcctgtcaataaagccgacgaggccgcaaaaaaacacgatcaagcctataataattatatcaataaaggtttaaatccctacctgaaatttaataaaggtgatcaagactttatcgactctttgcagtctgactcttctgtgggcggtaactttgcgcgtgccgtctttcatttgaaaaaacaaattgcgcctgcgctcaacgagcctaaagacacgggggaacctccggccaagaaggacaaacgcgcgggcaataaacgtcacctatattttgcgcgcttaaataaaggcgcgaaaaaagccaaagctgatcctaacaacatggatggtgatatgggagataacgaacagggagcgggtgaggcgccagctgctgaaggcggagcaagatctggtggcggcggtggcgcgattggtggaggaggaggcggtggcaaccacggcgtcggcatctcaacgggaggatggatcggaggatccatcttgggcaagaataaaatcatcacacgcaatacgcgtcaatgggtgtgcaccattcgagacagccacagatacaaacaatacacacaatggcgccaaggaaacacaaacgtaaaaatgcaagggtacaccacgccttggaacatgttcaactttaaccagtacagcagccactttaatcccaacgaatggcaatggctcgtcaaccgggcctcacgcttcagaccagtgagaatggaagtcaaaatctataacctacaaatcaaacaagaaagcactcaagacacaaccgcacaatataccaacgatctcaccgcgggtcttcacgtgctctgcgacggagaacacgcctttccttggacgcagctaccttgggaccaaggatgcatgccagaactgcctcacgacgtctggaagctgcaacaatacgcctacatcacggtcgccccttatgcgcaagacacgacggacgacggcgacgagctcgacatacgaggcggcgtacccatgtatctcctagaggagacggatcacgccgtcatccgcacaggcgagagcatcaccttccatcataccttcgactgtgggtgggtcgacaacacacgctcgagcgtcatgcctcaggcggcctgcatcaatccgctcgtcgactccagactcgtaggagtctggctcaacagcaccaataacgggacaaacgagaaccaaatgagaccgtatcagaaacacggtccgtggtggccgggacccggttaccgagacaacagaaacaccagcgacagcggaacccaaggaaacaccgtcctgggaccttacatcagcgtctggaagccggacggaatcgtctacgatgggtctcatgtcagatccggagtggccacgggtccatacgtaggaggccagtcgagcgacatcacgacaggcaactcccacaacaacgccaatcatctcagattcacaccgggagacggaccgggcggggcagaccaacacaacttctttatccggcgaagttccgtccacacgggaaccagggatcaagctctctataaagccaccggcaactcctcagaggaagtgaaaaatgtctacatgatgccaaaccaaatgtgggactcggcacctatttccagatataatcctatctgggtcaaagtacccagagtggacagacacaccttgctcgacaccgacgacggaaccttacctatgacgcatcctccgggaaccatctacgtcaagctggccaatattccaactccgaatggcacaggacatctcaatatctacgccacaggacaggtatcctgcgagatcgagtgggagtacgaggagcacttcaacaagaattggcgtccagaacgcagaatcgacgccaacaagatgcgcgccgacgtctacaaaatcaacgaacagggtggatacgacctgcctcaatcttattacgaaaccatgccaaccaggtgggggcaggaaaaagtgctgtaacctttgctctgtatgtaaattcaataaagctcatatgcagatttcaaaaagactgcatgttgacactttaatttttatgtgggtggtgatggg

SEQ ID NO: 265 - DNA, 5076 bp, Porcine bocavirus 5/JS677
  source 1..5076: mol_type = genomic DNA; note = Porcine bocavirus 5/JS677 - NC_016647
ttttcgggcacagccaatgacagcgatggggtgacatgacgtcaacgatcctgattgggtgggagggtctatataaagaggaaaccaggaagaggagctcattcttcggcgggacatcgaggtgttcacatcgaggaagctcctgagatcatcgctggcgaagacagctccggcaagtactttcttatatctgctggcatggcttctgctggagttgggctgtctgatcaggagtggattaattactggcatggagctattacaggctttaagagcccatgctatacatatgtcattcatctggatcttcaggactggagacctcatgagagggctctcatggacatttattcgaaggatgtttctgtgatcatagatgacatagtggatactgagaaagaattactgctcagcgatgtcacttatgaatggaaagccagtctggccatgaagctccagaatcatcacgggctcggtcagaccttgtgtgagtctgctgacatcgccgttcgacggctctttcaactgaaacagcagaatcacaatcctcaatacagctgcttcacgcaagctgagataggaccatccaagattcatgttcatgtagtatgcgggggagatggtctaactagattcaacgccaaaaagtgcacttggatcatagctaagttcttctggaatcatatgctcgagctctgggagcattttgagagctgctacaggccaacgaacgcgcagatggccattggggtacaactgcgcatgctctgtgagagaatcaagtctaaacaagatacaaccgttactattctgacctataaagacagacacaacgagcaacacgctcagcgggtcaacggtcctagctacatcaccaactatctcttaccgaagaatagacagttggtgacctggttggagatggatgtccgcacaccgagcgtagcttggtttgagacagagaagacctacatgtgcagtcacattgataggcagccgatcactcactatctcagaaagggtctccatgaccggctggtcatgaacagttctgaggagacaggagggcctgtccataagatggcgcgctggggagagcttcctcaggtgggtgaaaactcgctagctagagagaacactcggcctaggcctgccaagatcaccaagaaacaatgtgtgatgatagatacactacagagatgcgaggatgaacacatctgcactaaagaggaactaactatgctacgtccagatctggtgattatgtttgaaagctctccaggcggctctcgaacgctagatgaggtgctcgagatgcatcgcgtgagagtcactcgctcttacacagctctaggctatattctcaaacagtttccagacaacaagttcattaaaccggagaataaggtggtcaggcttttgaacatccaaggctacaatccaatccaggtcggccactgggtggcgaccgtgctctctaaaaaggcaggaaaacagaacacactctgtttctatggtccagccagtacagggaagaccaatctagctaaagcgatcgcgaatgcggtgaaggtgtatggttgtgtcaatcacctcaacaagaattttgtctttaacgactgccagagcaaactcttagcctggtgggaagagtgtgtgatgcacaacgattgggttgagccggctaagtgtctgatgggagggacgaccttcagagtagataggaaacacaaggatagcgctgaacaacctcagacacctttgatcatcagcactaaccatgacatctacacagtggtgggtgggaacacagtcactaccgttcatgaaaagccgattcgagatagagtggtccagttcaatttcatgaaaacgctgcctcagaattttggagagatctctgtctctgatgtggctgactggctcggctggtgcgccgaggactttgatctctcgctcgacgggttcaagaaggaatgggacattgacgttgttcccaacagctttcctctagcggtctactgtgatggtcatttacaggattttgtgctctacgctcaaggaccttgttgtcgctgtggtggctacttgcctcatactactaccagcgacggtgattggactgagtccgctgatccaggtaggactctgcgcatgcgcgagagggagacacctagagggtgggatgggatcatctcatgactctgtcttctcttacagatcctgttcctgtggtggtttcttctccgaagaaggtaaccgcgactcagggaacacagaccgatcctgagccttcgagtgagtacatcgactggagcagttgtccaaccaatgagtcagagattctccgatatcaaatctcgcagcagcaaccggttctctccttactcgaggatccaggcgagggaccctcgagtcaacgagaggtctacaaccgggacggagcatggaacgtcttcctcggagcggatggaaacggatcccaaccagggatcctcgtcgcggtcgaccaagtccttcgggaggaagcagaggggatcatcgagccagagttctggctctcttgtggggaatcgttggaagagcagcaagatggctaagaaacaaaatccagcgacggtgttcatggaacacaagaagagggagggactcgacatggacctctgtgggttttactatcactccacaagaattgcaggaaagggaactagatggatttttgatgtgggtaaaaaagaattccaatctgttgccagacaaaattgcattacctgggatcaatgtagggagttactttttacgtataaacgatgtctggacactatgtaccgatctatgatgtatcactttagattcactgaatgtcataaatgtgattactgggatgatttctatagacagcatttagcgggtgtgactcctcctgagactgttgctccttcttctgtaggtgaactatcagacgtggaaatgttagaagcagttgaatcaatgaatgagtcttaagcgcggtcagttccgcggtgttctgtttcctggttataattatttgggtccttttaatcctttggaaaacggtgatcctgtcaataaagccgacgaggccgcaaaaaaacacgatcaagcctataataaatatatcaataaaggtttaaatccctacctgaaatttaataaaggtgatcaagactttatcgactctttgcagtctgactcttctgtgggcggtaactttgcgcgtgccgtctttcatataaaaaagcaaattgcgcctgcgctcaacgaacctaaagacacgggggaacctccggccaagaaggacaaacgcgcgggcaataaacgtcacctgtactttgcgcgcttaaataaaggcgcgaaaaaagccaaagctgatcctaacaacatggatggtgatatgggagataacgaacaaggggcgggtgaagcgccagctgctgaaggcggagcaagagctgctggcggcattagcggcggtggtggaggaggcccgagtgggaaccacggcgtcggcatctccaccggaggatggatcgggggatccatcttaggacataaccgcatcatcacaaaaaatacacgtcaatgggtatgcaccatcaaaaatgaccacaagtacaaacaatacacacaatggacccagggaaacaccaacatgggcatgcaagggttcaccacaccgtggaacatgttcaactttaatcagtacagcagtcactttaatcccaacgaatggcagtggctcgtcaaccgagccaagcgcttcagaccggtgaggatggaaatcaagatctacaacatccaaatcaaacaagaaagcaaccaagatgtcacggcgcaatataccaacgatctcaccgcgggtctgcacgtgctctgcgatggggaacacgcctttccctggacgcagctgccctgggacaaaggctgcatgccagagctgccgcacgacatctggacgctgcagcagtacgcctacatcacgtgcgcctctgaggcacaggacacgacgagcaacggaaacgagctcaacatacgaggagccgtgcccatgtatctcctagaggagacggatcacgccgtcatccgcacgggcgagagcatcgccttccatcacaccttcgactgcggatgggtcgacaacacacgctcgagcgtcatgcctcagatggcctgcatcaatccgctcgtcgactccagactcgtcggggtctggctcaaccaagccggaaacgggacgaacgaagaccagatgagaccgtatcagaaacacggtccgtggtggccaggacccggctacagagacaatagaaacaccagcgaaaacggaacaaacggacataccgtcctgggaccttacatcacagcctggaagccagagggactcacctacgcctcgtcccctgtcagatacggagcggccacgggtccgtacacaggaggccaatcgaccgaggtcgtgacaggcaacgccaacaacaacgccaacgttacgagattcacgccgggagacggaccgggtggagcaaacaacaataactactttatccagcgaagttccgtccagacgggaaccagagatcaggctctctacaaagccacaggaacctcaaccagcgaagaagcaagagtaggcatgatgccgaaccagatgtgggactcggcacaaatctccaggtacaatcccatctggaccaagatacccagggtggacagacataccttactcgacacagaggacggaaccttaccaatgacacatcctccgggaaccatctacgtcaaactcgccaacattccgactccgaacgggaccgggcatctcaacatctacgccacgggacaggtctcctgcgaaatcgagtgggagtacgaggaacacttcaacaagaactggcgtcccgaacgcaggatcgacgcaaacaagatgcgcgccgacgtctacaaaatcaacgccgacggcggatacgacctgcctcagaactattacgaaaccatgccaacacgatgggggcaggaaaaagtactgtaacctttgctctctgtatattcttttcg

SEQ ID NO: 266 - DNA, 5267 bp, Porcine bocavirus H18
  source 1..5267: mol_type = genomic DNA; note = Porcine bocavirus H18 / Bocaparvovirus ungulate 4 - NC_038538
aaccagacattgggagagcagatgtttttctcgtcaagagtgtgtaatctggaggatattcttgcagaacaaggatacaggcagtgttttatgatcggatcggatgtgacattcggcggacgaaaagcttattttaacagccatggaaattgtgagatctgggactattataccgctgtcgaagaaggaagaattccggaagattattacagatggtggggatatgaggacgagaagctctttacatatgccagggaaaaactgacagagctgagttcaggatcagaaccattcaatcttacacttcttacagtagacacacattttgaagacggatatgtctgtgatttgtgtcaggatgaattcggagatgaccagtacgcgaatgttatggcatgctcaagtagacagattgcagcatttattgaatggatacagcagcaggatttctatgagaatacgacgatcatactttgtggtgagtaaccatgcctctgaacaactttcaagccgcatttgaaagcttcgggggaattgcatatacttatattctgagacttcctaaatttcctacgaataattatcataatatgctgcagcgatgtttgggggatagcgagcatatctacttgcatgaaagagaggaatgcggaaagcactatccagactttccaaatggttgctccgacttagcagattaccagaaaaaatcatacgaacacaacattgctatatttgctgaaaccgccgtaaaaaaggtgtttgaaaatcagcaaatgacaagaacaccatcttatgcttgctttgttcaagttgagcacggaaaaaatctccatgttcatttagtattatcaggagacggactcacaaaatatacagcaaaaaactttagatcaaaattagctgtatatttttacgcacaacttgaacaaaaacaaaaagaagaattacaagagctgtatggaaacccaaattgggaagcatatacaaaaccaatttcagaagctctaactaaatcacaagatggaagcacagaattctgcacagtactacagtacaaaagcagaaacggagaaatgtactcttgccgcgtggacgcaagaagcttcatagctaattatatgctaccaaagaacttagaaatcaacgataaaatatggtcaaatacctacaagattccgggaccactagcagacacgtttcttttaaatgggaaaacttatacatacagcagcatcaactcaatgcaaatcttaccgcacattagaagagatctaaaagagtggctggaagatttgcatggaataaacactgacgaaccaattttttctggagatccgctttctgatctgcctaaggtaagaaaggcacaatgggaaaaaacaactcagccgggaggaaaaatgtctaaaagagaaggacttgtactagactgtatgaatagagccattgaatctgactgtttaacgtatgaacaactagtagacaaacatccagaaataataataatgatggaaagccaagcaggaggaagcaaattaatagagcagactttgaacatggtgcatataaaacttacgcaaaagtatacagccatgtcatatatgatgaaacggtttccaacctttaacctgcaatcaaacaataaagcaataagactgttaaattatcaaggatataattactggcaggttggacattggctatgcactgttttagataagaagagcggaaagcagaacacaataagtttttatggtcctgccagtacaggaaagacaaaccttgccaaggccatagtgaattgtgttaatctatttggcaatgttaatcatttaaacaagaactttgtattcaatgattgctcaaacaaacttgttgtatggtgggaagaagcactgatgcatacggactgggtagaacctgctaaatgtgttttgggaggaacaaccgtacgaattgacagaaaacacaaagactcacaattactgccacagacaccatgcatcatatccacaaataacaatatatacgagtgtgttggtggtaatcatgtgtctcatgtacattgcaaaccgctaaaagacagagtggttcaactaaattttatgaagacactgccgcaacactttggtgaaatttcaacagaagaggtggcagcatggctcctaacttgcaagaacaaatttcagtgcacattagaaggttactgcaatcaatggaaagtgaagcacgtaataaacgacatgccgcttgccaaagtgtgtgcctctcattcacaggattttaccttacatgaacaaggaacgtgcacccattgtggtgcttacctgcctcttactattgatattgaatcttgcggcggtgataatcctggggacgacggacgtaagtaacattttttacaaaagggacagggaaataaatctttaaaagatactaaatatctatttcttcataggtgtccctgattcagcaatcatcggaactaatagctcgagtgctcgaggtcaaggcggagaacctgacagaaagaaggtgaaataccaggtacttactaaagaacaggaagaattcctagatgagtgggcatcacaaccacaggatgaatcagagatcgagctatacaaccgaagaagagagcagctcttcgaatcgccgctctcctctggcagcaaggacatctccgaaacagagccgacatcggagttggagtcggagtcggagtcggagtccaagaagaaaaagggaggagagcccatacagggggaggaaagagatgagcagatctccccagaaacaggggaaagagaggattgagcagcctagaaaacaatttaaagaaaaaaagaatagcattgttgatgcttttgtaaaatataaagctaagcataatactgatcaatctttttgcgggtttcactggcattcatggagattagctaaaaagggcacagacagggtatttgatgaaatgaaagctgaatttcaaattcgctgcagggatgggaaaattgagtggcctgatgcaagagaaatgttgtttaaatttaaaaaagctatagataaagattacagaagcatgctgtggcacttcagatttactgaatgtactaaatgtgatttttgggatgatgtgtacaaaaaacatatggctaatgtgcatcatgaacctccacaggaattaacagacgaagagctacttgcagcattgcaagaagctgaagctggaaaataaaactgatgatcattgtgctcatgtttattataagcttaataaaatttgacatatgaatcaattgtttcctgtggtacgctccaaaaaaaacgacggcaaaagaggacacgggaaaaaagctgaaaaacgaccaagtgaactaaaagatcctgaaaaacctacaggtgaactcgaactagttggagaaagatccaactgttccaaaactcaaagacatttttactttgcgcgccaaaaccaaggtgcaaaaagagcaaaaatgtccgcacaggggggcgagaacattgaagaggttgaagtggatacaggtgcgggaagtgggcggtcaggcggtggcggaggaggtggaggaggaggaggctctacaaatggaggaattggaatggcaacaggaggttgggttggaggaacatactttggaaaaaacaaaatagtaacaaacataacacgtcaatggtacgtgccgatatataacggccacaaatacacaaaacagacagaaacagataatactaacttttggaacggaataagaacaccatggggctacattaacatgaactcatacagctgtcatttttctccaaatgactggcaaagacttttaaacaactacaaaaggtggaaaccaaaaaaaatgaggctgcagttatacaacttacaaataaagcaagtagtccaactaggcacagatacactatacaacaatgatctgacagcaggggtgcacattatgtatgacgggtcacaccaatacccatactcacaaagtggatgggacagtgagctaatccctgaactgccagggatgatttataaactaccaaactattgctacttccaggaactaggtgacataggtgatacaggctcagacttaagagaatcatggctagggacagcatgtcccttattctttcttgaaagctcctcacatgaggtactaagaacaggagaagaaacaggatttgaatttgattttgattgtggatgggtacataatgacagagcattttgtccaccacaatgcgactttaatcccctaatcaaaaccaggcgaagcagaataataatgggttcttcaggaaacacatcagaaccatactatgactacaaaaaacctagcaattggatgccaggaccaggaactcgactaaacggacaccaatcaggaagcaatctaaaaacatcttctgggccctttaacacatcatgggcaccaccaggggtaacacagggaagtgacacaacctacctaaactcaccagcaatgaatcaatcacaatgggcctcaaaatcaatgccaacagcaccagcaaatgctgcatgcagtcaagtagacccaaactcactagcattcaacgaaccaacacaattaggacagcaaggtgacactaacataagatacaacaacataagcaatgatctaactagatggggaacagtatggagtcagtcacaacaagtatacacatcacaaccaacacgaactcgactagacacagtatggcaatacccaatgcaagcatggaacggacaggaagtaacacgctacgctccaatttgggacaaacaaccaaacacagattaccatacaacattatcatcatcagacggaacacttccaatgaaacatcctccaggaaacatattcattaaagtagcaaaaattccaataccaacggaaacaaacacagattcatatctaaacatatactgcacaggacaaatttccattgaaattgaatgggacgctgaagaatatgaaacaaagaactggagaccagaactaagaataacatcctcaaacattggcagaggggtgtacaacataaatgccgcaggagaatacaacacaacaggaagccaactcagcaacatgccaacaagatttggaatgaacagaatcaactaaacaaggatttgatatttctttacaagaccaccaccaggacgccatatttgttttgggaaattatttttcccaaaactaactttgtgatctatcctcctgtttcttctcctgttc

SEQ ID NO: 267 - DNA, 5114 bp, Porcine hokovirus
  source 1..5114: mol_type = genomic DNA; note = Porcine hokovirus / Tetraparvovirus ungulate 2 - NC_038546
cggttgtgacgtcagttccggtgacacaattccggttccggttgcgtatttccgcttccgccggaagatggcgtggccggaagatgagctggccttgtagaccacacctacctcgcctataagaatcagtgtcagttcctcttccacctctttcgccgctcaccgaggtacagcgatggaggcgtcctgtttcaccgcggttctgcacgtgcctaagagtctctgtgagtctgccgctgtactctttgagtacccggctgatattttgagtagtgttccagatgtaattgaggactggccagttactgatctccaaagtgcttccgagtactttgatataggggtcaatctgggcagaattatttacagggagctactggaatcatttgccatgattcttccacaacatcgtagccccaagctttttttgcagcttgaaccctcatcatctgaggagaaagcctttcactaccatctcgtagccgagcagggtaatgtgtccgggagggaatttagcaactggttgaagagatgggcaacattcctaactcgccacatggcaccggggcatagttggagcattctgtgggatatcaggaagaccagacaagggagactgtatcagtgcgacctgacatttgttttaaggtatctactgcctaaagtaccagtagagcatgtctggtatgcttggactaacatggagagatttgaggctgcagccctaagtgttccggcacgcgtccggtgtctctcagagggtggagctattgctctcccgttcacgggagggagcggagaatcctccggtagccccagtgcccctaccatggctgggaaaggtacggagcgatttttaaacctcattgactggctcgtggaggagggcatagccaccgaacgacggtggttggccacggataagaaaagttatcgctcttttcttggatcaagcggtggggtgctgcaggcgcgtaacgcgctgcaggtggctcgaagagaaatggttctcgcccggccattacttggataccttcgccgaggtggcagtgatattgcatcggataataaggtgacagagctttttcgtattaatgggtatgatcctgaagatgccgcgtggtactttgcagcctgggccgcgggcgcgtgggctaagcgacgtgctatgtggttgtggggtcctgctagtacaggaaaaaccctcctcgcagcagctatagcagctgtagctccttcttatggctgcgtgaattggaccaatcagaactttccattcaatgactgccactgccagtccctggtctggtgggaagaagggaggatgactgaaaatattgtggaggtggctaaagcaatcttaggtggagcgccggtacggctggatgtgaagaacaagggttcagaggattttatacctacctgtgtcataattaccagcaacggcgatctaacagtcactgtggatgggccggtagtcagtaccgcccatcaggaagccctacagacaagaataactatgttccagtttcagcggttagtgccacctggcctagctccgttgccagaaagagatctgagagacttttttgcatggggtgctcagctactcgagtctaagggagccccacccgaacagtttcgagtgcctcgcaggagtgataagccacgcctgagcgagatcatccgatctccccgtctgccaattgctgcagaggaaaggcccacgtggtctagtgaggacgagtggtttagcccgaatagggagcgccccaccactccggaggttccggcagccgatgagtccacggacgtgtctgtctccgagctggtgtcgctgccatttcctgatctggacgcccccgaaaggtatcagcgcgatttcccgcttgatgtagaggctgcctggctggatgtctttgtggattgggcacagaatctaaatctgcgagcccccggggctccacgagctggaagtctttaccggtaccaccaatggttgtctgaaccttggaggtaccggcagactttaagccgcactgagggctacgttcgttctcggatgtacgactggattaattggtgaatatactgaaatcaagtaagtgactttcttttgtcttttctttattttatccttgtctgtttattagggctccaacggaagaaggcgttggatcccgtgctgaacaagtggagtgacacgtgtccctctccatttttttgcaggtaagaaatcatgacagccgctgacgcctttaagccggggcaacctttccccctcgataccctcatggagaaattgacccccgatgttggccccgagccatcatcatggagtagacgtatgggtgggggttacctggcctctttaggtaccgggctagtatttaaacaagccttctcccatgtggataaatttatcagaaaactacctgccaaggtatatccagtgaaacaatttgcacagcaattgatgaactactggcggaagtcaactgatatcaaaactattgggagatttttcatggacctggtcagacttctcatattagttgctcccgaacctgccaaggccaaattgaggcagtctgcgcttaacttaggtgattttcaccggccgcctaatccggccgtgttgttggatttacacaaatttgctaaggatgccgtagtgccttctgcggaggatattaaaatattctttgaggagagtgtatctccttggtctgaggaagacaaaaaaattttgaaacagattgaagggcagttccaggaaatattccatccacccacagatacggaggatggagccgatagctacggtggcaacagtgatcaaggaactggttcccttagtgaaccagaccttgaacgccctcccgagcgccccggaatcttggtccccgggtacaattatgttggtcctggtaatcctttggataatgctcccgctaagggaccagtggatgaagcagcgaaacaccacgatgaacggtacgatgaaatgcttcgccatggtgatttgccatacatccatgggagaggggctgataggttgatgaataaggagatagagagggcggagcaggagggtaaaattgataaccctgtagatgcattggtgggtaatgcaatccggggtatctgggaggcaaaggagactcttggggatattgcagatgttcaattatcacaggttttaccgcccgacccgcctaccagccaagtgcttccgggctcttcagaagacgcccccagcccgaagagacagagggctggtacccctgattctgttcctacgcctggcaacccatcccctgcgccaattgctgatcctgctacaatcatggctgcgccggtaacgggcgccaccggtgggggtatcaaagttaaagctcaatggttggggggcactcatttctctgataataccatcgtcacttctcataccaggacttctatgctggctgaccggggcggatacgtcccggtgtaccgcagtgggagccatgtttcggaccggcagcctgttatgggtatgcggactccatacagttatatagatgtaaatgctatatccgctcaccttacgccgagggatttccagcaactgcttgatgaatacgaggagattaggcctaaaaagcttgtgataggcatatcggggattgtcatcaaagatgtgtctgtcactaccaccggcactacagtctctgatagtgcctctggggggattactgtatttagtgatgatgcctatgactacccatatgtcctgggacataaccaagacacactcccggggcatttgcccggggagaattatgttcttcctcaatatggctatcttactcgaggacgagagtttgataagggaactgatattgtgggaattgctgaccataggtcagaactgtactttctagaacatcatgatgcagagtgtctggggtccggtgatacatggtctcatgcttatgagtttcccagcgacttgccttttcggcgtttaaccacgccaaatcaaagtctgtacgcccggcataatcccattcctccgtcgcggttggcgatcatgacaggggtagataattctggagttcctaagtggaaaaggccagccggcgaggacgttggaaaacatcctcttaactatgtccctgggccgtctgttatgatgcccacagattcacagattagaaatactgatttcagagttcccctcgcaattggtaacccagttacgggggaccgctacagtgtcggtcccctggtacatcaaccctggagtatccgcacggaggagggtaaatctccaccagacaattttgctattcactcttacctcggcggggtagcgtatacacgccgccgtcacgaggaaagttataccggccatacagaggaaatggacgggtctgttaccaacccgtctcgagtagtagtaaatgaggtggacatggctgcacctcacgtcggccatactttcatggtacctggccataccagagtggatgggagtgggagtggaagtgatacagtctatgatccaaaactataccaagaacccatatttcccctattccctgctgctgtgtggaatcccaatccattaacatatgactgtcagatctggaccaagatacctgatactgagtgccggttctttgcgcagtatcccctactgggtggctggggaatggatgctccaccgcctatggtgtttctgaagatgagatctcagccgggacctccacctgggggtgctcatacagtgcctaactcaaatctaaaccagtatgcaatttttcacctgcattatactatcgagtgggaggtgaaacgccgccggcgcagtagacgccataaccccgagaaacccgcgccgtttcctacgacagactccggccgtatgccgtttatgcttgctaatgatgatcgggaccccaatgtacctgtgtacgaggttccttctgatcagtgggttgcccagaatttctcccgcaaattgtaatgctaaccctaataaaagattcattgctgatgcaacaaagatgtctgacactgattcttataggcgaggtaggtgtggtctacaaggccagctcatc

SEQ ID NO: 268 - DNA, 5403 bp, Porcine partetravirus
  source 1..5403: mol_type = genomic DNA; note = Porcine partetravirus - NC_022104
agtcacgataacttccgccggaagatggcgtggccgttcgacatatcatacctgtgtttaaccccaaccctagccctaatctattttagtgatgatgacgtcattctacttccggtgacgtgtttccggttccggttgtgatgtcagttccggtgacacaattccggttccggttgcgtagttccgcttccgccggaagatggcgtggccggaagatgagctggccttgtagaccacacctacctcgcctataagaatcagtgtcagttcctcttgtacctctttcgccgttcaccgaggtagagagatggaggcgtcctgtttcaccgcggttctgcacgtgcctaagagtctctgtgagtctgctgctgtactctttgagtacccggctgatattttgactagtgttccagatgtaattgaggactggccagttagtgatctccaaagtgcttccgagtactttgatataggggtaaatctgggcagaattatttacagggagctactggaatcatttgccatgattcttccacagcatcgtagccccaagctttttttgcagcttgaaccctcatcatctgaggagaaagcctttcattaccacctcgtagccgagcagggtaatgtatccgggagggaatttagcaactggttgaagagatgggcaacattcctaactcgccacatggcaccgggccatagttggagcattttgtgggatatcagggagactagacaagggagactgtatcagtgcgacctgacctttgttttaagatatctattgcctaaagtaccagtagagcatgtctggtatgcttggactaacatggacagatttgaggctgcagccctaagtgttccggcacgcgtccggtgtctctcagagggtggagctattgctctcccgttcaccggagggagcggagaagcctccggtagccccagtgcccctaccatggctggtaaaggtacggagcgttttttaaacctcattgactggctcgtggaggagggcatagccaccgaacgacggtggttggccacggataagaaaagttatcgctcttttcttggatcaagcggtggggtgctgcaggcgcgtaacgcgctgcaggtagctcgaagagaaatggttctcgcccggccattacttggataccttcgccgaggtggcagtgatattgcatcagataataaggtgacagagctttttcgtattaatgggtatgatcctgaagatgccgcgtggtactttgcagcctgggccgcgggcgcgtgggcgaaacgacgcgctatgtggttgtggggtcctgctagtacaggaaaaaccctcctcgcagcagctatagcagcggtagctccttcttatggctgcgtgaattggaccaatcagaactttccattcaatgactgtcactgccagtcgctggtgtggtgggaggaagggaggatgactgaaaatattgtggaggtggcaaaagcaatcttaggtggagcgcctgtacggttggatgtgaagaacaagggttcagaggattttatacctacctgtgtcataattaccagcaacggcgatctaacagtcacagtggatgggccggtagtcagtaccgcccatcaggaagccctacagacaagaataactatgttccagtttcagcggttagtgccacctggcctagctccgttgccagaaagagatctgagagacttttttgcatggggtgctcagctactcgagtctaagggagccccacccgaacagtttcgagtgcctcgcaggagtgataagccacgcctgagcgagatcatccgatctccccgtctgccaattgctgcagaggacaggcccacgtggtctagtgaagacgagtggtttactccgaatagggagcgccccaacactccggaggttccggcagccgatgagtccacggacgtgtctgtttccgagctggtgtcgctgccgtttcctgatctggacgagtccgaaaggtatcagcgcgatttcccgcttgatgtggatgctgcctggctggatgtctttgtggattgggcagagaatctgaatctgcgagcccccggggctccacgagctggaagtctttaccggtaccaccaatggttgtctgaaccttggaggtaccgtcagactctaagccgcactgagggctacgttcgttctcggatgcacgactggtttaattggtgaatatactgaaatcaagtaagtgactttcttttgtcttttctttattttatccttgtctgtttattagggctccaacggaagaaggcgttggatcccgtgctgaacaagtggagtgacacgtgtccttctccatttttttgcaggtaagaaatcatgacagccgctgacgcctttaagccggggcaaccttaccccctcgataccctcatggagaaattgactccggatgttggccccgagccatcatcatggagtagacgtatgggtgggggttacctggcctctttaggtaccgggctagtatttaaacaagccttctcccatgtggataaatttatcagaaaactacctgccaaagtatatccagtgaaacaatttgcgcagcaattgatgaactactggcggaagtcaactgatatcaaaactattgggagatttttcatggacctggtcagacttcttatattagttgctcccgaacctgccaaggccaaattgaggcagtctgcgcttaacttaggtgattttcaccggccgcctaacccggccgtgttgttggatttacacaaatttgctaaggatgccgtggtgccttctgcggaggatattaaaattttctttgaggagagtgtctctccttggtctgaggaagacaaaaaaattttgaaacagattgaagggcagttccaggaaatattccatccacccacagatacggaggatggagccgatagctacggtggcaacagtgatcaaggaactggttcccttagtgaaccagaccttgaacgccctcccgagcgccccggaatcttggtccccgggtacaattatgttggtcctggtaatcctttggataatgctcccgctaagggaccagtggatgaagcagcgaaacaccacgatgaacggtacgatgaaatgcttcgccatggtgatttgccatacatccatgggagaggggctgataggttgatgaataaggagatagagagggcggagcaggagggtaaaattgataaccctgtggatgcattggtgggtaatgccatccggggtatctgggaggcaaaggagactcttggggatattgcagatgttcaattatcacaggttttaccgcccgacccgcctaccagccaagtgcttccgggctcttcagaagacgcccccagcccgaagagacagagggctggtacccctgattctgttcctacgcctggcaacccatcccctgcgccacttgctgatcctgctacaatcatggctgcgccggtaacgggcgccaccggtgggggtgtcaaagttaaagctcaatggttggggggcactcatttctctgataataccatcgtcacttctcataccaggacttctatgctggctgaccggggcggatacgtcccggtgtaccgcagtgggagccacgtttcagaccggcagcctgttatgggtatgcggactccatacagttatatagatgtaaatgctatatccgctcaccttacgccgagggatttccagcagctgcttgatgagtacgaggagattaggcctaaaaagcttgtgattggcatatcggggattgtcatcaaagatgtatctgtcacaaccaccggcactacagtctctgatagtgcctctggggggattactgtattcagtgatgatgcctatgactacccatatgtcctgggacataaccaagacacactccccgggcatttgcccggggagaattatgttcttcctcaatatggttatctgactcgagggcgagagtttgataagggaaccgatattgtgggaattgctgaccataggtcagaactgtactttttagaacatcatgatgcagagtgtctggggtccggtgatacatggtctcatgcttatgagtttcccagcgacttgccttttcggcgtttaaccacgccaaatcaaagtctgtacgcccggcataatcccattcctccgtcgcggttagcgatcatgacaggggtagacaattctggagttcctaaatggaaaaggccagccggcgaggacgttgggaaacatcctcttaactatgtccctgggccgtctgttatgatgcccaccgactcccagattagaaatactgatttcagagttcccctcgctattggtaacccagttacgggggaccgctacagtgtcggtcccctggtacatcaaccctggagtatccgcacggaggagggtaaatctccaccgaacaattttgctgttcactcttacctcggcggcgtagcgtatacccgccgccgtcacgaggaaagttataccggccatacagaggaaatggacgggtctgttaccaacccgtctcgagtagtagtaaatgaggtggacatggctgcacctcacgttggccatactttcatggtacctggccatacccgagtggatgggagtgggagtggaagtgatacagtgtatgatccaaaactataccaagaacccatatttcccctattccctgctgctgtgtggaatcccaatccattaacatatgactgtcagatctggaccaagatacctgatactgagtgccggttctttgcgcagtatcccctactgggtggctggggcatggatgctccaccgcctatggtgtttctgaagatgagatctcagccgggacctccacctgggggtgctcatacagtgcctaactcaaatctaaaccagtatgcaatttttcacctccattatactatcgagtgggaggtgaaacgccgccggcgcagtagacgccataaccccgagaaacccgcgccgtttcccacgacagactccggccgtatgccatttatgcttgctaatgatgaccgggaccccaatgtacctgtgtacgaggttccttctgatcagtgggttgcccagaatttctcccgcaaattgtaatgctaacgctcaataaagattcattgctgatgcaacaaagatgtctgacactgattcttataggcgaggtaggtgtggtctacaaggccagctcatcttccggccacgccatcttccggcggaagcggaactacgcaaccggaaccggaattgtgtcaccggaactgacatcacaaccggaaccggaaacacgtcaccggaagtagaatgacgtcatcatcactaaaatagattagggctagggttggggttaa

SEQ ID NO: 269 - DNA, 5075 bp, Porcine parvovirus
  source 1..5075: mol_type = genomic DNA; note = Porcine parvovirus / Protoparvovirus ungulate 1 - NC_001718
aatctttaaactgaccaactgtctttgcgtatggtgacgtgatgacgcgcgctacgcgcgctgccttcggcagtcacacgtcaccatcagcaaagacagttggtcagtttaaagattaataagacattccattggctgaaaagaggcgggaaattcaaaaaaagaggcgggaaaaaaagaggtggagcctaacactataaatacagttgcttacttcagttagttcctttctgcttcagactgcacttcgctccagagacacagctacaaactactctcagctactgcagcatggcagcgggaaacacttactcggaagaggtactaaaagctaccaactggcttcaagataatgctcaaaaagaagcattctcttatgtatttaaaacacaaaaagtcaatctaaatggaaaagaaattgcttggaataactacaacaaagatacaacagatgcggaaatgataaacctacaaagaggagcagaaacatcatgggaccaggcaacagacatggaatgggaatcagaaatcgacagcctcacaaaacggcaagtactgatttttgactctcttgttaaaaaatgtctctttgaaggtatattgcaaaagaacctaagtccaagtgactgctactggttcatacagcatgaacatggtcaagatactggctatcactgccatgtactactaggtggaaaaggcttacaacaagcaatgggaaaatggttcagaaaacaattaaacaatttatggagtagatggttaataatgcaatgcaaagtacctctaacaccagttgaaagaataaaattaagggaattagcagaggatggtgagtgggtatcgctactaacctacactcacaaacaaactaaaaaacaatatacaaaaatgactcattttggaaatatgattgcttactacttcctaaataaaaaaagaaagacaactgaaagagagcatggatattatctcagctcagattctggcttcatgacaaatttcttaaaagaaggcgagagacacttagtcagtcacctatttactgaagcaaataaacctgaaactgtggaaacaacggttactacagctcaggaagccaaaagaggcagaatacaaacaaaaaaagaagtaagcataaaatgcacaataagagacttggttaataaaagatgtactagcatagaagactggatgatgacagatccagacagttatatagaaatgatggctcaaaccggaggagaaaatttaatcaaaaatacactagaaataacaactcttactctagcaagaacaaaaacagcatatgacttaatacttgaaaaggcaaaaccaagcatgctaccaacatttaatattagcaatacaagaacatgtaaaatattcagcatgcacaattggaactacattaaagtctgccatgctataacttgtgtactaaacagacaaggaggaaaaagaaatacaattctatttcatgggccagcatcaacaggaaaaagtataattgctcaacacattgcaaacttagttggtaatgttggttgctacaatgcagccaatgtgaactttccatttaatgactgtacaaataaaaacttaatatggattgaagaagcaggaaacttctctaaccaagtaaaccaattcaaagccatatgttcaggtcaaacaattagaattgaccaaaaaggtaaaggaagcaaacaaattgaaccaactcctgtaataatgactacaaatgaagacataactaaagttagaataggatgcgaggaaagaccagaacatacacaaccaataagagacagaatgttaaacataaacctaaccagaaaactgccaggtgattttggacttttagaagaaactgaatggccactaatatgtgcttggttggtaaagaaaggttaccaagcaacaatggctagctatatgcatcattggggaaatgtacctgattggtcagaaaaatgggaggagccaaaaatgcaaaccccaataaatacaccaacagactctcagatttccacatcagtgaaaacttcgccagcggacaacaactacgcagcaactccaatacaggaggacctggatttagctttagccttggagccgtggagcgagccaacaacaccaactttcaccaacctgcacttaactccaacaccgccagattcagcaatacggacaccaagtccaacttggtcggaaatagaaaccgacataagagcctgctttggtgaaaactgtgcacccacaacaaaccttgaataaggtaggatggcgcctcctgcaaaaagagcaagaggtaagggtagttttaagggggtggtgggcatacatataaaactaactgcaaataatttttttatatattacaggactaactctaccaggatacaaataccttggtccaggaaactcactagaccaaggagaaccaactaatccatcagacgccgcagcaaaagaacacgacgaagcctacgacaaatacataaaatctggaaaaaatccatacttctacttctcagcagctgatgaaaaattcataaaagaaactgaacacgcaaaagactacggaggtaaaattggacattacttcttcagagcaaagcgtgcctttgctccaaaactctcagaaacagactcaccaactacatctcaacaaccagaggtaagaagatcgccgagaaaacacccagggtctaaaccaccaggaaaaagacctgctccaagacatatttttataaacttagctaaaaaaaaagctaaagggacatctaatacaaactctaactcaatgagtgaaaatgtggaacaacacaaccctattaatgcaggcactgaattgtctgcaacaggaaatgaatctgggggtgggggcggcggtggcgggggtaggggtgctgggggggttggtgtgtctacaggtactttcaataatcaaacagaatttcaatacttgggggagggcttggttagaatcactgcacacgcatcaagactcatacatctaaatatgccagaacacgaaacatacaaaagaatacatgtactaaattcagaatcaggggtggcgggacaaatggtacaagacgatgcacacacacaaatggtaacaccttggtcactaatagatgctaacgcatggggagtgtggttcaatccagcggactggcagttaatatccaacaacatgacagaaataaacttagttagttttgaacaagaaatattcaatgtagtacttaaaacaattacagaatcagcaacctcaccaccaaccaaaatatataataatgatctaactgcaagcttaatggtcgcactagacaccaataacacacttccatacacaccagcagcacctagaagtgaaacacttggtttttatccatggttacctacaaaaccaactcaatacagatattacctatcatgcatcagaaacctaaatccaccaacatacactggacaatcacaacaaataacagactcaatacaaacaggactacacagtgacattatgttctacacaatagaaaatgcagtaccaattcatcttctaagaacaggagatgaattctccacaggaatatatcactttgacacaaaaccactaaaattaactcactcatggcaaacaaacagatctctaggactgcctccaaaactactaactgaacctaccacagaaggagaccaacacccaggaacactaccagcagctaacacaagaaaaggttatcaccaaacaattaataatagctacacagaagcaacagcaattaggccagctcaggtaggatataatacaccatacatgaattttgaatactccaatggtggaccatttctaactcctatagtaccaacagcagacacacaatataatgatgatgaaccaaatggtgctataagatttacaatggattaccaacatggacacttaaccacatcttcacaagagctagaaagatacacattcaatccacaaagtaaatgtggaagagctccaaagcaacaatttaatcaacaggcaccactaaacctagaaaatacaaataatggaacacttttaccttcagatccaataggagggaaatctaacatgcatttcatgaatacactcaatacatatggaccattaacagcactaaacaatactgcacctgtatttccaaatggtcaaatatgggataaagaacttgatacagatctaaaacctagactacatgttacagctccatttgtttgtaaaaacaatccaccaggacaactatttgtaaaaatagcaccaaacctaacagatgatttcaatgctgactctcctcaacaacctagaataataacttattcaaacttttggtggaaaggaacactaacattcacagcaaaaatgagatccagtaatatgtggaaccctattcaacaacacacaacaacagcagaaaacattggtaactatattcctacaaatattggtggcataagaatgtttccagaatattcacaacttataccaagaaaattatactagaaataactctgtaaataaaaactcagttacttggttaatcatgtactactatcattgtatacttcaataaaaataaattgtaaaatcaataaaactaagttacttagtttctgtatacctatactagaaataactctgtaaataaaaactcagttacttggttaatcatgtactactatcattgtatacttcaataaaaataaattgtaaaatcaataaaactaagttacttagtttctgtataccaattatccccaaaaaacaataaaattttaaaaagaaacaagctctcatgtgtttactattaactaaaccaaccacacttatatgaccttatgtctttagggtgggtgggtgggaattactatgtattcctttgagttagttggtcgcctttgggcgactaaccaagcggctctgccgcttggttagtcgcacggcgaccaactaactcaaaggaatacatagtaattcccacccacccaccctaaagacataaggtcatataagtgtggttggtttagtt

SEQ ID NO: 270 - DNA, 5905 bp, Porcine parvovirus 4
  source 1..5905: mol_type = genomic DNA; note = Porcine parvovirus 4 / Copiparvovirus ungulate 2 - NC_014665
tgtttttgaaaagcgccaggcctctcgccggtcgcccctgacgtcacatccgcttccgggtcaaagggcggggtcaaaggtcaaaggtcttcatacgtcatatccgcttccgggtcatgacctttgaaccggaagtaccggaagtgacccggaagtaccggatgacctcttgcgcaatctctgagaaagagagaatctttttcgagtgttgggcgacgccggcctgctaatcaatacactagagggcttcgccatctttgacagatatgttgcagtcaacttccgggggtgggacttccggggtcaaaggtcacttccgggtcaaaggttgtttttccggtgacgtcacgggatgtgacgcagtacagaccgacgagatatttggcgcttttcatacgtcatttccggaggaggagttcatttgcataatttatgcaaagtaggaggagctaattagctcttcccactttgcataaattatgttaatgagatgctaattaattaatgcaaagtaggaggagcttattgacttctcctactttgcataatttatgcaaatgagatgtaaattaatttatgcaaagtaggaggagccttttttgattggacggggcttcaaatccattaatttgcataatttatgcaaagaggaagttaacctgattggtcagtttttttggcgggaagcaatttgattggacgggaacttaagtcctaatttgcattgacgtggaccaatcagaattgagtacatattatataaggagggcgaaaaagaggaagtttgccatttgcgttttggagaccgtcgcgagcagaactccgtcgttttcggcctgtatttgaagatggaaacctactggacaggtatttgcagactttttcctgatgttttaaaaatacctggtgtttatgaaggacgctatatttttgaagttcctgtttctacgcgtgattgcatgaaatggcctgatatatttggcaacgagaataatagtgaaaatcaacagtctggcgcggcgcctccggcgccgcgcgaaaatcttagtagtaatctggtaatcgctgttcggcaggcggaggctttgtttagagagctgcagaaagagcttagaaaatcatgtcgtttaggggtagatcctggcatttttatgcagttagaagaagtagactcaaaaggtggcttgcacttgcattggtgtgtgtctgtgtccgctggtactccgcgggatgtgcttacaattttcaaaaatacagagaagaaggtctctctgtactattttggggtggagggtctgagcttctttgtgccccataagaataaacacggggcctggaagagcacggacgagggctttatctacaactatctgcttaaaaaactgccgctgaaagagtgtttatatgcttggaccaccatcggtggagccatcggtgatgcttgcctaaatactgataagagaaaggagttgctggataatagacaggacccagcggtgatcgaagagctctcagctcccatgtacaaatgtgccaccggggagaaaatgcttgatatcgtgcagtggctggtggataacaacatctgctctgagagcagatgggaaaataagaatgctctaagtctatactcgtttctggccacccaagcaggtggatacatggctaaacagtgtctgagaatcgctcagcaaaagttattaaaagagaaacccctggggttgactctgatggatttcaaggatatgaatgctctgcggcgctttcagcaggatgagggggaaatgacttttgacaataacagaatgcattatatctttgccattaacaactatgatcctaaaattgcttcggtgataatgtacttttggagcatgaaacaaacgggaaagaggaactgtgtgtggttttacgggcctgccacaacaggaaagactaacatggctcaagccatctgccacagttctgcaaactatggcaatgtgaactggaataatgcaaatttcccgtttcaagatatcgcgggggctcaggtagggtggtgggaagagggaaagatgactggtgatatggtcgaagctgctaaagcactactggggggaactgctttgcgaatcgaccgcaagtgcatgcaatctattgaggttaacagtccacctttcctcataacctcaaatgtggacatgactattgtacaagagggaagttttgtaagctttgaacatcagcaaccattagaggacaggatgataaagtttagctttaatatgaccctgccgggcaattttggtttgattaccagtgaggaagtgaaatctttttttcggatgggagctaaacttgctgcgcaaccggacattatgaactgccctatatttaaaaaaggacctgccagtattagacatttagttcctgttggagagatcccacccccaaaagaaatgaagcataaaaggcagccactctacatgagagcggaaccagatgaaattcaagacaatccagaagaactggaccactggttcgaagaagaagcaccgagaaagaagaaacagaaaacaaaaaatactgcaactaagaaccctgctgagacggtggagattataactgagactgaattcatccctgcaccaggtaagagatgagtacttatttactatcagaataaaggataaactgtacccagcagtagttgataagtgcccctctcttacagatacacagccacaactggtgtttgacatccagttagaagaggaagcagaaatttcagatatcatcggagaacaataaaatgttcggcggacaaggtattataccgatactaacatgggagcaattagaagcttttatgtgggctgggcaaggaatgtcaattgactattacagaagctgtttaagcgattgtatgctatttggggaaaaatttaacatccatatgccaaaaacaaaaaatttattattagaagctgaatacctatatagactttttcacagtggttttgccaatagtgcacaaggtttcagagaaagagtagaaagatggagaacagaaagcaaactgagatgtccccaatttgatagacccatggatgcctcacaaaggcatgcatacttaggatttttctatcaagccctcagtaaattgccggaaaatgcctctgaggaagatattctgcagaccatacatgattctgatgacaccagtaaagaaaaattctatgcatttatggaaaaaattcagcaagaaccagaatatgtgtttaaagagcctgatagcattccgcaaccagaagctcctgttacagcagttccggttgagacatcaccaactgaaaacaggtaccttctcttacacatcaagatactaagaaagacaaggtggaggaacgtttgccttgtcccttagatttttgtgatgaacattggcagggcagacacccgctaggattcaaggaagaagaagaagaaatacaaaaagaaatagaagaagatagaagagaagaaacagaaacaatcgaaaaagcgcaacagggtgaaggagaacatgaaaagggaggactcacctggcccggtcatcgctacacaggtccattcaatcctctccctcatggaaaacctgctgatcaacttgacgaagcagctcttcgacatgatacaaggtacaaaacaatgcagaaacacggtcactggcctcatttatgggcaccatttgttgacagacagatgagccaagaaattcaacaggttttaaaaggttctacaaaactgagccaaaaactacttgcaaacttcatcatagcactatggcgagcaaaagaaaaaataggagctcctatatatgagattgtaaaaggggtttttccaagtgttgataaaaaaactgttgaaagccttttaccgcaccctgaccctatacctgctcctccatcttctccacagcgaggatccaaacgtgcatctcctcctcagagtcctaatgcacatgatgaagatacaatgagcgggcacaagcgtcagaaaactatggaagtggaatctgaatgtgataagtctttgctttgtccaacgcagaatgctggagctgattttgagctttgcgggacgggagggggggcaactaatgagaaagggacatgggtgggagggacacaatttaccgatacatctattaggacatttggtactagaagatgtgttctctcagcgtttcctgacacttactgttctatgatgtctggagacgctataccttctattatttttaatacaccatggtactattatgatctaaacattatgtcctgccatttctctccaagtgcttttcaaactttaattgaagattatgatgcatttagacctagatcgctaacagttcatttaaaagagcttgtaataaaagatgtatgtcagcaacaaggtttacaagctgagcaggtatctgacaataactctgctacactgcttgctttcgaagatgttaattatgaacttccatatgttttaggtggtggtcaagtatctgtgccaggacatctaccgggacaaccatatcaactgccaaaatactcatacagaactgttggaaaaccagacccaaacagcggcttcgtgccgggaaggaacacacatccagatcaaggaccaggacatccaaaagcaagtaaaacaatttggtactcgcaatatttagaaacccaagacaccgaattctatatattagaaaaccacaaagcaacaattttacactctggaaatacattttcccaaaattacaattttcctgatctgccttttgagcagttgacacagtatatgtgggatgcacggaggcaggacaatccattgatagatcagagaatacaggtgatgagcagaatgtatgatgacggcccacagaaaacatttgctatcgaagtgaacccatacattgtaccattcacagtaaaaagcaccagcagaccagctatgttcttagcgggaggaagatttaaagatggtgattattcaataacaggtccaggagatagagaaaaaacgagtttcagatattacaatgatcctccatggatcatcaccagagatacctatctcttctccagcgatttagctaaaactgaaagagaacagccaggacccagacagggagacacagtagttaggacccctgatggaacactgatagtgactactaatgcattagcttatgggtacacaacagaatatctaaaaaacattccgcttttgagttccaaataccatggggttgaaaacttcagactagctgttgaaaatgaaagaggatattcaatgccaggtcacccgtcacatatcagagaaacattattcagaggtaaactgccaagtgggataagggaatcaactattaaatcagaggatcaaagaaaagaaataacatttccagattacatgggttctgtaaatgaaaaaacaacagcaaatttagaatcgcagatatggtctcagataccgaacactgatatcactgaaaaatgtacaacaccaccactatccatttggggtatgaaaaacccaccaccgatggttttcctgagactcctggcacagatgggaccaccaagaagaagcgcctgcagcggatccattccaagcaatacatatttgaaccaatattgccaatttttgcttacatatgaaatggaatgggatgttattaaaagaaccaggaaaacggtgaggtggaatccaattcctcccccgcaaattccgatgggacctaacaatcttcctgtttatattttgaacaaagagggacaatacagaatgccgacggaagtttggaccgcaaaacagagacccagacaccgcagatgatatcaataaagtttttgaaattaaaaaaaagacttcctctttattg

SEQ ID NO: 271 - DNA, 5805 bp, Porcine parvovirus 5 - NC_023020
  source 1..5805: mol_type = genomic DNA; note = Porcine parvovirus 5 - NC_023020
ttgaatttgaaaagcgccaggcctctcgccggtcgcccctgacgtcatatccgcttccgggtcaaagggcgggtcaaaggtcaaaggtcttcaaacgtcatatccgcttccggttcatgacctttgaaccggaagtaccggaagttgacccggaagtaccggatgacctcttgcgcaatctatgagatagagaatgtaaaattcctccaggcttaggcgaccggtacgccgccggcctgctaatcaatacactagagggcttcgccatctttgacagatatgttgcaatctacttccgggggtgggacttccggggtcaagggtcacttccgggtcaaaggttgtttttccggtgacgtcacgggatgtgacgcagtacagaccgacgagatatttggcgcttttcatacgtcatttccggaggaggagttcatttgcataatttatgcaaagtaggaggagctaattagctcctccctctttgcataaattatgtaaatgagatgttaatttatttatgcaaagtaggaggagcttattgactcctcctactttgcataatttatgtaaatgagatgtaaattaatttatgcaaagtaggaggagccttttttgattggacggggcttcaagtccattaatttgcataatttatgcaaagaggaagttaacctgattggtcagtttttttggcgggaagcaatttgattggacgggaactcaagtcctaatttgcattgacgtggaccaatcagaatggagtacatattatataaggaggccgaaaaagaggaagtttgtcatttgcgttttggagaccgtcgcgagcagaactccgtcgttttcggcctgtatttgaagatggaaacctactggacaggtatttgcagactttttcctgatgttttaaaaatacctggtgtttatgaaggacgctatatttttgaagttcctgtttctaccagagactttatgaaatggcctgatatatttcaaaatgaaaaaaataatgaaaactgtgagtctggcgcggcgcctgcggcgccgcgcgatgaaattgacagtaatctagtaacggctgttagacaaggggaggctctatttagagagcttcaaaaagaacttagaaaatcctgtagattaggagtagatcctggcattttcatgcaattggaaagagttgactcaaaaggtggcttacatttgcattggtgtgtgtctgtgtccgctggtaccccgcgagatgttttaactatattcaaaaatacagaaaaaaaagtttcattatattactttggtgttgagggacttagcttttttgtaccacacaaaaataaacacggagcatggaaaagcacagatgaagggtttatttataattatttactaaaaaaactaccactgaaagaatgtctttatgcatggactacaattggaggtacaataggtgaagcctgtttaaatacagaaaaaagaaaagaactattagataatagacaagatccagcagttattgaagaattatctgctcccatgtacaaatgtgccactggagaaaaaatgctagacattgtacagtggttggtggacaataatatttgttctgaatccagatgggagggaaaaaatgctctaagcttatactcattcttagccacacaagctggaggatatatggcaaaacaatgcttaagaatcgctcagcaaaaattactaaaagaaaaatcactagggtcaaccttaatggattttaaaaacatggatgctttaagagctttccaacaaagtgacatggagtgctcattcgatcataacagaatacattacatttttgcagctaacaactatgatcctaaaattgctgcagttataatgtttcactggagcatgaaacaaacgggaaaaagaaactgtgtatggttttacggtcctgctacaacaggaaaaacaaatattgcacaggcaatctgccatagctcagctaattatggcaatgttaaccggaacaatccaaattttccttttcaagatattgtaggagctcaggtagggtggtgggaagaagggaaaatgacaggagacatggtagaagctgcaaaagctttgctggggggaactgctttgcgcatcgaccgcaaatgtatgcaatctgttgaagtcaacagtccaccgtttattataacatcgaatgtggacatgaccgtggttcaagaaggaagttttgtaagctttgaacaccaacagccgttagaggacaggatgataaaattttcatttaacctgacactacctggaaactttggtctgattacaactgaagaagtgaaatcttttttccggatgggtgcaaaactttcagttaaacctgaaatcatgaattgccaaattttcaaaagaggacctgccagcatccgccacctagttcctcttggagaaattcctccaccaaaggagatgcataaaaaacgacagccactctatttgagagctgaaccagatgaagaacaagaaacaccggacgtcttggatcattggtttgaagaaccgagtcaaaaaggaaagaagacagaagaccctgcaaacacgacacctcctgcggcttatgagaatttagatgacaactttgaacctgttccaggtaagaattttgcatttatcattttttaatgttccaaaaaaatagagcaaattggtgatatgtgcataattcttacagatagccaagtgaacctgatatttgacgtggtctacgaagagacaccagaggtggacgaagtggaggaacaatgagctttagtgggtattctaaaaatctccccccgggtttagaggaagttacattcccattttgggttgattttttgcttgccagaatagctgattttattaattggtgtgggtattataatattaaatgtccagaagcagaaaaggtatttagtattggacaatctacacaggttttacttaaatggccgggtgcacagggaaaagaaaaccgagttaagaactttaccgaagctgcgtttccatatatgaaagtacctgtgagaccagacaacattgaatggattaaaatccatgagatgctacataattatgatagacaaataacaccgcagacaactgagaatgatttacttgcagctatcactgctgacttcgataagagagagatcatccatccagtcaccggcgagaaatgggttttcggtaagaaaacagaagcttttgctactgatttggaagaagccgtggatgaagaagatcctgatacagagaaaaaacaacctactgataaaacacaaagtaataacaagaaaggggaaattggtgaaaagaaagaagaaggtgatacccctacgtcaaatgaggaacatcaccaatcaagaaagctattagaacacgactcaagcgaagaacaaccagaagaagctggtcaccgagaacagaaagaactagaagacaatattgaagacatcaaacatggagcgggagaagaccaaaccggaaccggtatcaactggccaggacatcgctacacaggtcctggaaatccactccctcacggagctcctcgcaatgaaattgatctctctgctgcgaaacatgatatcaggtacaaacaatattctcgatatggtcactggccatacatttgggcgccatatattgataaaaaaatgcaagaagatattagagagatagtaaaaaaaggtttaggattagaaggtaaacttttaggtaaccttatatcagctttatggcaagcaaaatacagattaggagccccgatatatgaaattttaaaaacaattttacccccgaaaagtatgcctactaaagaatctgtagaaaaacatttaccaaaacctttgcccattgatcctccacagacatccttaccaggtgcatctcctcctcgaactcctgacttgggtggcgagactggaatgaatgaagagcctccagcaaaaagaagaatgacagaagacagatgtgacagcaccacaaggtgcgaaacattggacacacaatatgaggattctaaaatggcgggggggggtggggggggagggaatcaacctaaaagttcttggattgggggggctttctttactgatacgacggttactacttatggtactagaaggtgtgtgcttagctcttttccgcataactactgcaccacagagagcggggatcatatacctagccttgttgtctgtactccatggtactattatgatcttaacattctatcagctcatttctctccctctgcttggcaaacgcttttagaagagtatgatgcttttaaacctttaaaattagaagttaaaattaaagagatagttgttaaagatgttaataatgtgacagggaaacaatgctgtgacacagtttctgacaatgccatggctgcagtgctgtgttttgaggatacacattacgagctgccatatgttttgggagggggacagctaacagtgcctggtcatcttccaggacaaacttatgaacttccaaaatactgctatagaactgtgggaaaacctcatagcgagatgtggtcgcctatagatggttccaaaagagcccacttagacatgccttttgttcagccaacacagaacactgagttctttattttagagaacagacactctaccatccttcacacaggcaatgaattctttcaaacttatgactttccagatttacattttgagcagctgacacagtacatgtgggacgcgaggagacttgacaatccaatgaaaggtcaaagaatacaagttatgaaaaacaaacctacagaaaacaaagatcaaatgtttggtatcagagcttcgagttacctcgttccctggattgtcaactctctaaacagacctgctatgtttttgcaaggaggaagattaaaagacggggattattccattgttgggcctgggaccagagaacaggcaacataccactactttaatgatacacctgtcgtggttgaaagagatatttacaaatttacaactagtatgcttaaaagagaaactcaacagccaggaccgagaacacaggaaacaacggtaaaaacacctgatgggaccataattataacaactaacagtttagcgtatggacaggtgcctgaaaacattgataacataccgagtgatcacaaagccgctttcggggttacagggtacaggcttgctgtcgctgaacagagagggtatagcacacctggaatgccttctcatataagggagatattattgacaaaaacaccgaaactattagaaaaagatcagcaagaaatcacatttccaaactttgaagggtctgtcagcgaaaaaacttccgctaatctagagtctcagatttgggcttatatccctaacactgataacaaacataactgcggaacgccccctttatctatatgggggatggaaaatcctccacctatggtttttttgaggttactccctcaactgggaccccctgaaaaatccagctgttctggaagcaaaccttctaaaaagttcttaaatcagtactgccaatttttactggaatatactgtaacatgggctgttgtgaggcgaaagaaacatactccgaggtggaaccctatgccgggggtcacaattccaacttataacaacgatcctgtgtacatccttgaccaaaatggattttataaattaccagaaactgtttggacagcaaagcaacgtgttagagcgagaagataataaaaataaaaaattgagaaaaaatagttcttcctcttttttt

SEQ ID NO: 272 - DNA, 6148 bp, Porcine parvovirus 6
  source 1..6148: mol_type = genomic DNA; note = Porcine parvovirus 6 / Copiparvovirus ungulate 4 - NC_023860
gcgtgagagagggcgtttttcatttacgttttgatgacgttgctgttctctgattggttagtttttcaagtcctcatttgcatatttaatggaccaataggatttacttctgctttttatggtataaaagttcgtacttctgctttttccctcattctgtgctttggagctgatctgtttagatctttttgcttctctgcgccgaaagcctctgtattatgtctcagaccttctggacgggtatttgcaggcttttccctgatattgggaagattcctggggtgactcctgagcggtatatttatgctgtaaacgtgagtacccgtaatgggcaaaagtggccgaaagttgggaccgaggggccattggctgcaggtgtcttacagggggaggcccttttccgtgagacccttaaagaggtccggaaggtgtgccggctgccgcaagacccccatcttttctttcaattggagaaagttgattccaaagggggtcttcaccttcatttttgtattagtgttgctgctggcactcctagagatgtgtcttcgatgtttaaagccattgagcgtcgagtttccttttactactttggtgtagagggcttgactttttttactcctcataaaaataagcatggggcttggaagagtaatgatgaggggtttattgtgaattatcttcttaaaaaattgcctttgtctgagtgtgtgtatgcgtggactaatatggatggggtgattggcgatgcctgtctgaatgaagataagcgcagggaattgttgtctgagcgtcaagatcagggagtcattaaagagctcactgctcctacttttaaagcggctacgggtgataaaatgttgagtgtggtggattggatgtgtgataatgatgtgactacggagcgccgatgggaggaaatatcggctgcgtccctgtactctttccttgctaccccagctggcactcatttggctaaacagtgtcttagagctgcgaatcagcgtattgtgagcactaaacctcttggtttgagtctctgtaaatttgccagtgaaaaggagcttcgtgcttttcaaaatggggatcctgagttgtcttcagacaacaataggatctattacttatttgctatgaataattactgccctgatatggccagtatgattttcttttggtggtctatgcgccaaacgggtaagagaaacagtatttggctgtttggacctgctacaaccggtaaaaccaatttagcaagtgctattgcacatactgctgccagttatgggtgtgttaactggaataacgcaaatttcccgtttcaagacattgtgaatgtgcaactgggttggtgggaggaaggaaagatgacagaggatgtggttgaatgtgctaaggcattgctagggggaagtaatgtaagagttgaccgcaaatgtatgcaatctgcggaagtgcaatctcctccttttattatcacatccaatacggatatgtgccttgtttctcaaggcagttacatcagttttgagcaccagcagcctctccaggatagaatgattaaatttgagtttaaccatgttcttcctggcaatttcggcctcatttctgaagatgaagtcgtggccttcttcagaaatggtgcttataatgtgttgaagcatgcgtacatgagaaaggcccagctttttgctctcggtccagcttccttgccatataagccccctacgggtgaattagtgtgtatagaccaagctaagtctccttctccctctgcttctcgccgcagtgtgagaaattggatgacgtgtccccctgatcctgtccaggacgatcccgctgaactggacgagtattttcctccagatactcctccagaggattgtccttgtcctatttctcctgtgagggagtcttgtccctcgccagggccttgccctacccctcctcgcaaaaaacaacggaagagcaagcattgctccttgtctgtctctgcgggtaaagttcctgtggtggttgtgggtgattctgactcagtcccccccgaagaaaaagaaaaagaggaagtttccgtgggggattcccaggatccacaactgtactgggacctaactctcagtcaatccgacgttcctgtgcctgaagacgagagtacccagtttcctgacgacgctgtggacgcttctgatctcattgctgaacagtagttaaggtatgagccgttctactcaaagagatctttggtctttgttaagggagagacttgaaacgtataaggatcgagttaaatattatggtattttggtgccagaacgtccttctacctttgcatcttattttagtaaagacccacctccagatcctccaactgttaaatttgataaaccctatcaggatgtagatagattctggtttccaacagacgactatactgactggtatgtctggcatggagaggacagacctcctagatttaccgagcattccggtgttcagggttttaaaactaggtgtgagggggggcttcctttaatccccagtgatcccaaattttgccccatacaaaatttttgggatcagttcgctaattttaatgaggggtctccgtccccccagatcggtgagagtgtttcatggagtgatcattttggaagtcccgatccctctcatcatcaggaggtgagggatgctgatgaagtagtttcagagcgacagcaatataaaaataggattgtcaccttattaagaaaagtttattgggctaagcagtggtctgggaaattacaaattaatgttccttccctcgaaagcctttatgagcagatcccctatatgctagcctatatggacgctgataattggcgtcagaatttgttagctgctaaaactctgcgaaccactttggaagcattttcctgtgttccagatccttccacgtgcgatgtcacaatctccacacccctatctggtgaaacggatcccgcctcttttgcaaaatacttatgttcccttgtatgcaacaggtctcaagaaaaagaacaggcgcagacgccttctttgtctccatctaaacaagaagggcagatgtcaagtcctgattctgcatcgatctcccaacctccccccgaaagtcacaaggatagactgcttcctaaaactgatccccttcaggaagcagggccccttcccgctccccccacagctcagaagcctattatctctaagggtgcaggcggtggagggtcgtctggcttcataatccctccaaaacctcctagccccgatcatactaaagatcccccccctcctcctcctccctctccaattcctcctcctacatctgcgcctgacgcagaggagcacgagctagagcgtgctaagcaggagaaacaagaggaagatgagctcatgcaaagaatcaaatcaggagaaggagaaggagaacgaggaggcttcgtcttgccttctcaccactacactggtcctagaaatcctgtcccagctggcaagcctgctgaccccgttgatgaatcttctgcgagacatgacatcaggtatgggcaacgtcttaaacatggagactggccatacctgtgggggaaggacttggataatgctcagcgagatgagattatcaaagctcttcatagtcatgtcaaagtgggaacccaattggcagggaatatagtgaggagtatctggaaggctaaggagctcttaacagaacctgtgtatgagctgttaaagtctattctccctccttcagatttatctaaagttcctcttcctcattcccaacagacagacagaacagaagatccagaaactccaggggagactagaggaactggatcagacagtcctcgatctcctcggccttctggatcaactgaagacgggggaggtccttcttccgagtccagattacctgggactaaagttccagtagacccatctgccaccacgtccgaagcaaagaggcagaggactgaggaggggatggacatatcttcttgctgtccaggggggatttctgcttctggggctgcttcaaataactctggtcttgcttgtgggggtggggggggtactaatttagggacagaatctcttgtatccggctgtcagtttggtaaaaactctgtgatcacttcatcttttagacgatgtcttatttcaccctggcctgataaatactgttgctcttctgctcatgatcttattcctggagtggtctacgagaccccttggtgctattatgatctgaacgtcatctcagcccatttttctccttctgcttggcagaggcttctagaggattatgatgcctttcggcctaaatcccttaaagtgaccatccagtctctagtgtttaaagatgtttgtcaaggagcagaaaaacaaacgaccgttcaggattcccagtcagccaccatcgctatctttgaggataaagactatgactacccctatgtgatgggagggggtcagaaaacagttcccggtcacttgcccggtcagccttacaatcttcccaagtattcttacagaacccttggttccgtcaaagaaagtaatagggccagtatgggcggttcagggtacactttcaaatccaatcaagacacggaattgttcctgcttgaaacacatgatgctactcttattcgaggcgggggtacttttgaacagtactatgaatttccaaacgatcttcctttcgaaaatttgactcagtatccttgggatatccgccgtcaggataaccccctctatcagcagaggatcactgtcatgtcaggttctgacagagatcaggtaggcattctagatggagatttttactctccttttcggttcaaaggtcatgatagacccgccatgtggctgccaggacagaggttgattcagggcaaattcatagatacgcatccaatacccaatacagggaggagtggggttcatcctaatgattttcacacaaggggtgatggtcatggggatacccatagaacacatgaagagaggatttacagtctagatacaggtcttgctgctatgccacgtgccgctcatagacccacccttcagcccggacctaggactctgtctcatgccgtacgcagacccgatggttccaccgtggtcacggctaatgcgtgtgcttacgcttacacccaggagaatcctcatcaggaaccctggagtgatctcaatgtcagacataccatgtataggttagcctatcaacgtcaaaaaggttttcagcaacccggggaccctcttcatattcgaacccatgcttgttatggggacggggatgttaccattccaaaagaagagtccttatggcctactgttctgggtagttgcacagaaaagtcccctgcctgtttagagtcccagatttggtgtaaaacaccaaatgtggacatggtctatggagaacacacaccccctcttgctttatggggtatgcatgctcccccaccccatgtatttctcaggatgcttgctcaagagggtcctcctaatgtcagtacttgcagaccggctcaatctggtcagaccttcatcaatcaatatggtcagtttctcctctgttttaccatggtatgggaagttaagcctagacccaagtccatcaagcagtggaatccacgtccgcccatcagcattcctgttggtcagtctggtcctgctttcattcttgatcaagatggctactaccgtctcccagaacatgtctggtctgccagggaacgtatccgcagcaaacgctagtgcccccagcaatacacttactacagtattgatgtgtcaggcattctggttgattgttttattttggctccgcctactgtatggcccatgtaaacgcatctattatgaaaataaaatacgtcaatttctgatgtaattcgtgttgtgattcttccttgaaaagcgcatattttcttgccggtctgagtgacaccacctatgacatcatataaatttgattacgtaacttcctctttttacttcctcttttttgattacgcaatatcacaattctagcagtcgactattacacaatatcacactttgagaccctgaccatcacacttttattttgtgcgcgagatgcgagcatgggccgcttcgc

SEQ ID NO: 273 - DNA, 4281 bp, Protoparvovirus Zsana/2013/HUN
  source 1..4281: mol_type = genomic DNA; note = Protoparvovirus Zsana/2013/HUN / Protoparvovirus ungulate 2 - NC_043446
tggaaagactacaggaaaccatctaagcaacctgaactgcaagaagtatggaaacttgatcaacaaactgtgagtaacagggatccagaccctgaatatactctggacatcaacaagacaccttatacacaaggcctaatactcacagcaatagtcaaaaaaatactatttgactatttcaaacaaaaatccatacaaccagaagaagttaattggttcatacaatcagaagtaggaaaggactcgggcctacacatacactgcctactacaatcagacaaaatacaacaagcctctggcaaatggatggtaaaactctttgcagaaaaatggggcctatacttatgcggagcattgccttttcacaaagacacattacaacacttcttcaaccaaaccaaattcagacaactagttgaagaaaatgactgggtccaagtgctctgctacacacatccacagacaaaaaagaagtatgttaaaccaatcttcttcactgaactcatcactaaatactttctgcaaaaaacaccatgcaaaactgactctgacactggatacatctacagctcagatggtgcctttgcctttaacaatctaaaccacaaaagcagaaaactggtcagtgagcacatacaaagaattctttctcaaaaacaagaaaccaaagtcactgacatacaaccacaagaaaaaaaaagaaagagattagaaactgctaaagaaacaaccattaaagaaaccatccaaactctcacagacaacaaactccatacacaagaaaaatggatgcttggtgatccagactcatacatagcacaaattgccaatccaggaggagaaactatcatcaaagccacacttgatatagtcactttaaagatgagtgtagaaaaaacagcataccaactcatcacagaacatgatcactcaaactgcacaaaaccaaaaaaaaccaaagcatggaaaatcatcaaaagaaacaaatacaatccatacaaagtctaccatgcaatcatgtgctgcttaaacaaacagatgggcaagagaaataccatcttactatgtggaccagctagcacaggcaaaagcttaatagctcaacaaatagcaaagctagttggtaatgtaggatgctacaatgcaagcaatgtcaactttccattcaatgactgttgcaatagaaacctaatatggattgaagaagcaggaaacctaggaactcaagtaaaccaattcaaagctatcatgagtggtcaatccatcagacttgaccaaaaaggcaaaggcagtaaatctattgaaccaactccagtgatcatgactaccaatgaagacatcaccagagtagtcatcggttctgaaaccaaaccagaacacagacaaccaatcatggatagatgcttaagagtacacctcaaacatagactatcaggtgactttggactactatctgatgaagaaattcctgccatattcagtcacttggtcaaaaaaggctttctgcctacactagccaactactgcaacagatggggcggtcctccaacttgggaagaaaactgggacgcagagcctcaagagcttcattctaaaaaatcagacgacgaggacgacgacgaggacaacagcaatccagcaccatgtccgtctgcaggaactgcacgtacactttctgagagtctagacccagcaggccaagacatagatttccaacttctgctgcaaagtcttgaagaagattttgcaggtgaagaggaaattgagtgtggtcaggacctaacgaagtgcggtcaagacctcatgggtgactcagcggatgccaccaactaaccgagagcgaaaaggtaagaacattttactttagtttcattctctaatcatgcaaccatccgtctatatctcaccaatactcactcctctgctgggtggatttctacttctcctgctactggatctgcttatgctctacatcttctgcaacggcatctggaactgccactaccaaactaacttcatgatgcattccaaaaacactgccagaactctcatcactggactactaccaaccttatgcaccttatctatcacctgtctcatctggggactcttcatctgggcctactatacttactctcatacaaaagaaaaaactcaatgtggaatatgggactgcaaaacaatgtgccatataattggcaaagtggatcctaataagactctatcttgggctcaccagaactggacactaacttgtcatacttatatctaggttgggttcctcctggatacaactatctcggacctggaaatacaaacttcaacaaagaaccaaccaacttatcagacaaagcagctcgcaaacacgatttggaatacaacaaacttctaaaacagggacataatccatatatatacttcaaccacgccgacgaagacttcatcagagaaaccaaccaagcaacagactggggaggaaaattcggcaacttcatctttaaaaccaaaaagcatctggctccacaactggctcctccaaagaaagacaaaccatccacatccaaagaagaacctcgctactccttcagacacatcaaaggaggcaccaagcgaggtaagccattttatatctttgtaaataaagctagagcagctaaaagggcacgcatgtctgaaagcgcagacgcaacacaacaagatgaccaaccaaaccagccagttggggcgactggagggaaaggtggaggaggtggcggcggaggtggaagcggtgttgggcacagtactggtacttttaataatcgtgttgagtaccatcatcaaggcgatgaagttattatcatctgtcatgcaaccagacacgtccacctcaacatgtcagacagagaggaatatatcatctatgacacagacagaggtcccaggtttccaactgaccaatctctagagggtagagataccataaatgactcttaccatgccaaagtagaaacaccatggcacctcatccatgcaaacagctggggatgctggttctcacctgcagactggcaacatctaacaacaattgtcagagacctagtaccaatccaactagaccaagaaattgacaacattgtcataaaaacagtaaccaaacaaggcacaggacaagaagaaacaacacaatacaacaatgatctcacagcactcttagaaattgcagaagataaaagcaacattctaccatgggtctctgacaacatgtacatagactcactgggttacattccatggagacctagtaaactaccaacatactgttaccatgtaaactactggaatacaattgacatggcagcaggaccacaaaaaaatcaatggcaagtacgcaaaaaagaaatcaaatgggaagacttacaattcacaacaatagaaaactcaataccaattgacctactcagaacaggagacaaatgggaaagcggaacatatcacttcaacacaaaaccaacaaaactagtttaccactggcaaagcacaagacacacaggctcatgccatccaactacatcacctactacagaaggaggacaaggaacaaatgtagcaaccgtcaactcatggcaatggggtgacagaagcaacccaacatcagcatccacatctgtcagaaactgccacattggatatagctggccagaatggcaattccattacagtacaggcggaccttgcataaacccaggtgcaccattcagccaagtaccatggggaagcacagcaacaggaaccagactaacacaaggtgcatcagaaaaagccatatacgactacatgcacggtgatgcagatcctggtatgcgagaaacttggtggcaagcaaaccaacaaatgacaggacaaacagactgggcaccaaaaaatactcatcaatctgaactaaatgacactgtaccaactagaactgaagtctggacacaagcatatcacaacaccttcggacctttcactgcagtagatgatgttggaccacaatatccttggggagcaatctggggaaaagaaccagaaacaacacataaaccaatgatgtcagcacatgcaccattcctactaaatggaccaccaggtcaaatcctagtcaaactagcaccaaactatactgaccaactagacaacaacggactacttacaggaagaatagtcacttatgcaacattctggtggtcaggccgtctcatcttcaaaggaaaagcaagaacaccaagacaatggaacacctacaaccttccagatata

SEQ ID NO: 274 - DNA, 4613 bp, Protoparvovirus eulipotyphla 1
  source 1..4613: mol_type = genomic DNA; note = Protoparvovirus eulipotyphla 1 - NC_026815
taaaaaaaacgtcacatcctctatataaaacacaaaaacgaaaccaactaactcattctaagatggcgctcgctgagaacatacgcactgcaataaaatggctagaagaacaaaaaacaaaatctgctttgagttttgtgttcaaaattcatgatactcactttattccagaaagaggagcgataccaatacaagtaacctggaaagactacagaattccaagcaaacatcaagaaacaaacgatgtataccgactagacaacgaagcacttcaaagaagagatccagaagacagcacatcattcgcagtgagtgaagaaccttggttgcatgcactagtactaaccagcttagtaaaaaaatcaatgtttgactactttaaacaaaaagcattaactccagaagatgttagttggttcatacaaagcgaagtaggaaaagattcaggcttgcatattcacctactattacaaagtgataagattaacacaagcagcggtaaatggatatgtaaatttttagcagaaaaatggagtctatatctatgcgaaagcgtagacttacgaaaagatcactaccaaccattctttaaccagacaaagtaccgacataacatagaaaacaacgaatgggttcaaatactaaaatacactcaccaaacaacaagaaaagactatgtaaaaccagtcaattttggcagcatgatttttaactattttctaactaaagaaataatcaaacataaagatgacttgggatacatttatagcagtgatggcgcctttttatttgatgatatgaacatgacaacaagacacagaatagcaaaaataatgcaagaaaaagatggtcagttagaaagaacagaaatacaagaaattactcctcaagataaaaaaaaaaaaagaatagaaaccgctaaagaaataactataaaagaaaccatccaaacactaagcaccaaaaaattacatacacaagaaaaatggatgcttggtgaacctgatagctatatacaacaaattgcaaatccaggaggagaagctattataaaagctacattagatatagttactttaaaaatggcagtagaacacactgccttaacactgattatacaacatgaatttgaaaaaaatccaaaaataaaaaaaactaaagtatggaacctacttaaaaataattccatgaacccatacaaagtatttcatgcaatgatgtgctgtctaaacaaacaaatgggcaaaagaaacacaatcttactttgtggtccagcaagtactggaaaaagcctaatagcacaaaaaattgctcaattggttggtaatgtaggatgctacaatccaagcaatgttaactttccattcaacgattgtagcaacaaaaacctaatatggatagaagaagcaggaaactttggaactcaagtaaaccaatttaaagcaatcatgagtggccaagcaattagactagaccaaaaaggcaaaggtagcaaaaccatcgaaccaactccagttataatgacaacaaatgaagacataacaagagttgtggtagggtctgaacttagaccagaacataaacaaccaatcatggacagatgtattcgtgtacatctgaccacaagacttcctggcgactttggtttacttgatgatgaagagataccaactatttttaaaaaattagacaaacgaggcttcaaaccaactctagcaagttactgtcaaaaatggggaaatccacctacttggtcagaaaattggaatactaacttacaaaaagatcatgatagtgatgaagaaaacaaaaaccccatgcaacctaaaaaacctttagttgaagttttagatccaaagggagaagacgcacaattcgcagacctactacaaaacattgaaaacgagtggctggaagaaaaacgccttatggagatggatctgtcgcaagacctcatggctgacgtcaatgcctctacttaaaggttttaaagacggtaagcacatactgctacatactaactaaccatgcactacaaagagaaaaacttgattctctttatgtgcttcacaattactttactaactggctttaattgcattttattacttagcaatgcattacatggctactatccttttacagactcatacaaaactaaccgactaattttatatggaataatttgctgcataataattctaataatgtggagcattggaataatgacttacttctttctacaggactaaccttaccaggatataactacctaggacctggaaacagcgatttcaccaagaaaccaaccaacgcatcagatgcagcagcacgcaaacacgaccttgcttacggctcctatttaaaaaaaggacataatccatatattaacttcaacaacgcagataagacttttataaaagacaccaaccaagcaaaagactggggaggctggcttggaaacaaattctttaaaataaaagaacacattgctccaaagctaccagaagaaccaccaaccaagaaaccaagaccatctacatctaaagatccaaaatattcttggagacatcttaaagaaggcaccaaaaaacctaaaccattctggctatttgtaaacaaagccagacaaaaaaaatctatggacggaggcacatcaactgacacacaagatgaaccaaacgatgcagccgcaactgcaagcaacactggaacaactggtggcggagggggcggcggaagtggtgttggtcattctactggtaattttgataataggacggattttaggtatgaaaatggagaagttacgatcatttgtagagcaaccagactggttcacgtcaagatgtcagactcagaggaatacagaatcttccagaccaacaacggagaccaatttccaccatctacaaccagaaatgaagctggcatcaccatcaacgactcctaccatgcagaatgtctaacaccatggaacctagtcaactgtaactcctggggctgctggatgtctcctgcagacttccaacacatgtcaaccatctgcaccgaaatagatattcaatccttggaacaacaaatagacaacatagttataaagacagtcacaacacaaggcacagggcaagaacaaatccaactatacaacaacgacctaactgcactactagaacttgcattggacaaaagtaacattctaccatggacatcagacaacggctacctggaatgccttggttactttccatggagacctagtgttccaaggcctttcagatactatgttaactacttcaatgccatcttaattagaccaccaacaggaccaaccacaagcggagactatgtaagacaacgacaaggtattcaatttgacaatgtacaatttataactgtagaaaatcatataccaatagaactactaagaactggggatagttggtatagtggtgtttataaatttaaatgtaaaccttgttgcttatcatatcactggcaatcttctagacacattggtaatcctcatccatgtgtacctccaacagatgacacttcacttggtcagatactagcagaaggagtaacaggatggcaatggggaaatagagccagtccaatagcagacgcaacaaaagttagagactttcatataggaatgagttttccagaatggtatgtacactactcatcaggaggccctgttgttaacccaggtagttcatttagcatgcttccatttgtaccaaatggcgcaccatacgatggagtctttaacgaaggtgctagcagaaaaattgtttttgactatggtcacggaaacaatgatgcaaatactaacacagtatggtgtccagacgtacgatccacaggacaaacagactgggggccacgaaacatgatagctggagcaatccaaaaccaatatccacaaggccaactaaacccaaatgctaacgatgataatggctacacaacacaacaatatactactaacacattctcaccattcactgcagtagattcagttggtccaatatatccatggggagaaatatggaccaaaaaacctaacacagaacaccaaccaacactaagcgcacaagcaccatttatatgccaagataatgcacctggtcagttacttgtaaaacttgcaccaaactacactgatgaagtaaccatgagtggcacacaaacaaaaagaatagttacttatgctaccttttggtggagcggagtacttgtatttaaaggaaaacttagaacaccaagacaatttaatacttataacatgaaaatagaacaaggatatatagaaagaagtgaaatgattccaaatggtattggtaacattgaactgcctggaatgcatgctcgctacctaccaaacttcacaatgtaaccatgtaaccaaccaatcatgtaatggaccaaaaaaaataaaaaactttaaaatacaacaacatctctttcttattggcaaaccaaccatacaggtcatactgtatttaataggttgggtgggtgggccatacgcattatcagccccttataaggaagtaaggatttaaccattcatccaccataccaaccaactagttgttggtatg

SEQ ID NO: 275 - DNA, 4822 bp, Protoparvovirus primate 1
  source 1..4822: mol_type = genomic DNA; note = Protoparvovirus primate 1 - NC_038544
catggctctcagcaaagatgtcatggatggcatagactggattaaaaagaaaagagacaaacaaggcctaagttttgtcttcaaactaaatgatcttcacttcaaaccaactaaagatggacaaggaatcaatatcacctggaaagactacagaaaaaatccaagaaatgaagaaatcaagcaagtgattgaactagaccaacaaactgtgagtaacagggatggggatgaaagcaaaaaaatctctatcatgaatccacctcacagaaatgcaatcatactcacagggttggtgaaaaaaactctatttgactatttcaaagtaaaaaacattgaaccaaatgaagttgattggtttatacaaagtgaattgggaaaagacacaggcctacacatccatgtactagtctgcagtgaaaaaatcaacaatcactcaggcaaatggatgcaaaaatactttgcagaaaaatggggcctatacctaacactggtacttgctatggacagtgaacacttacaggccttactacaacaaaccaaattcagaaaacaagttgaagaaaatgactgggttgatgtgctaaaatacacacatccacaaaccaaaaaagcatactgcaaaaacatcaactttggtgaaatgattgcaaactacttcttaatcaaaaaaccagtaataacaaatgatgacaaaggctacatctacagtgtagacagtggattcaaacttaacaatctaagcttcaatgacagatacttgattgctaggcactgtcaaaatctcttccggagacaggatgacagtgaactaaccacaatccaaccacaacaaaaaaaaataaaaagaatggtgtctgctaaagaaaaatcaattaaagaaacagtagacagtttaactgacaaaagaatcatcaccagagaaaaatggatgctccaagatccagacagctacatccaattcatagcacaacctggtggtgaacaaacctgcagtgctgtcttagacatagcaaccttaagaattgcaacagaaaaaagtgcctatgacctagtcaaagaacatccaggcaaacttaaacatataaaaaaaaccaaggcctggaaactaatcaaaaacaacaacatgaatccacaaaaagtctaccatgcaatcatgtgctgccttaacaaacaaatgggcaaaagaaataccatcttactatgtgggcctgcaagcacaggaaaaagcctactagctcaaaaaatagcaaagttagttggtaacacaggctgctacaatccaagcaatgccaacttcccattcaatgactgtgtaaacaaaaacctaatctggatagaagaagcaggcaacctaggcactcaagttaactctttcaaagccatcatgagtggccaagcaatcagacttgaccaaaaaggcaaaggcagtaaatcaattgaaccaactccagttgtcatgacaaccaatgaagacatcaccagagtaataattggcacagaactcaaagtagaacacaggcaaccaataatggacagatgcttaagatttgaactcaaaaacaaactaagtggtgatcatggtttgttagaagatagtgaactgccagctatcttcaaatacctagaaggacatggattttatccaaccatgtggtcatacatagacagatggggaaccacgcctacatggggcgaaaattggaatacaaaacctaaggaagcatcttcacatctcattgagcaggagacagaagaagaagaaccttctgctcctccaaacacaccaacagaatggaacaatggaactgtacaatcaacttctaaatcaaccaaaccaactctagctgaatcactagatccagaagacaaagaatttgctctactcctaaaagacattgaagaaaccgagcgagcactagcaaccattccggaggaggaggagaacatagaagaattggcggcaacaggatatggccaaccactgttctccggtccggatgtgaatgccagcaattagaaaagctagaggtaagtttcactttctcattataacactaaccatggagggcctagaacagctctggcgctctctgccttgcttaataggcttctgcctaatgctactattcttcctattcttcttatggacttttctaagttcctacttcaactggaacagcaaaacaaacttagcaagacagctaagctctccaagagcaagaagcaaaagaacactactaatgagctttctaccaaccttactaagcttaactctcgtcttgctaatctggagcctcttcatctggctattctactttgacaaacaaaggattataaatattctactaataaaaactgaaaatggtaactatacttttaccatacaacctctttaggctgggttccgcctggatacaactacctgggacccttcaatcaagacttcagcaaaaaaccaactaatccatctgacaacgctgcaagaaaacacgatttggaatacaacaaactcatcaaacaaggacacaatccttactggaattacaatcacgccgacgaagactttatcaaagaaactgaccaagcaacagactggggaggaaaatttggtaactttgtctttcgcgccaaaagagcactagctcctgaactggcgcctccagctaaaaagaagacaaaaaccaaacacaccgaaccagaatacagccacaaacacatcaaagcaggcaccaaaagaggtaagccattttatctctttgttaaccttgctagaaaaaaagctcgcatgactgacacacaagatgtatctgaacaacagtctgaccaaccaagcgttgcgtcaactagtgctaaagctggaggaggtggaggtgggggtggaagcggtgtcgggcacagcactggtaattacaataataggactgagttttactatcatggtgatgaagttactatcgtctgtcactcaagtagacatatccaccttaatatgtcagagtctgaagaatacaaaatctatgacacagacagaggaccaagattcccaactgaccaaactctccaaggtcgagacactataaatgactcttaccatgcacaagtagaaacaccatggttcctaattaatccaaacagttggggaacctggatgaacccagcagacttccaacaactaacaaccacatgcagagaagtcacactagaacacctcgaccaaacactagacaacatagtcatcaaaacagtaagcaaacaaggcagcggtgcagaagaaaccactcaatacaacaatgacctcacagcactcctccaagtagcactagacgaaagcaaccaactaccttgggtagcagacaacatgtacctagactcactaggctacattccatggagaccatgcaaactaaaacaatacagctaccatgtcaacttctggaacacaatagacataatatcaggacctcaacaaaaccaatggcaacaagtcaaaaaagaaatcaaatgggatgacttacaattcactccaattgaaaccacaacagaaatagacttactaagaacaggagactcatggacctcaggaccatacaaattcaacacaaaaccaacacaactcagctaccactggcaatccacaagacacacaggctcagtacatccaacagaaccaccaaacgcaataggacaacaaggacgaaacataatagacatcaatggctggcaatggggagacagatcagatccaatgtcagcagccaccagagtatccaacttccacataggatactcatggccagaatggagaatacactatggctcaggtggaccagcaatcaacccaggtgcaccattcagccaagcaccatggtccacagatccacaagtaagactcacacaaggagcctcagaaaaagcaatctttgactataatcatggagatgatgatccagcacacagagaccaatggtggcaaaacaacctaccaataacaggacaaacagactgggctccaaaaaatgcacaccaagcaaatttatccaacaacatcccaagcagacaagaattctggacacaagactaccacaacacatttggtccattcacagcagtagatgatgtaggaatacaatacccatggggagcaatctggaccaaaacaccagacacaacacacaaaccaatgatgtcagcacacgctccattcatctgcaaagatggaccaccaggacaactcctagtcaaactagcaccaaactacacagaaaacctacaaacagatggactaggaaacaacagaatagttacttatgcaacattctggtggactggaaaacttgtactcaaaggcaaactaagactaccaagacaattcaatctctataatctaccaggaagaccaagaggaacagaagcaaagaaatttctacccaacgaaattggacactttgaattaccattcatgcctggaagatgtatgcctaactacacaatctaaaatggacttactaaccatctctattattttacttagttactgttactttctatataacttttataacttctttaatagattactaagatacttacatagtttataagttagtttataaattagttgataagttagttgataagttaattgataagttgtacaacaaggtgctgctattcacaatgtgaaactatccaactacccttaccatagtaagctggacttactgtattaatcaatctaacttagttgcttgctaatacccatgctctggcctagacttcaatggtactacaccaccaaaaaaatcaataaaaccaaccaatt

SEQ ID NO: 276 - DNA, 4928 bp, Raccoon dog amdovirus
  source 1..4928: mol_type = genomic DNA; note = Raccoon dog amdovirus / Amdoparvovirus carnivoran 3 - NC_025825
ccactacttcctcattccaccagaaatgacggattaattctcaaccaatatgaaattagcaagcgcgtagcgcccaacaccagcgccgaaggcgcgcgagcgaagcgagctggtgttggttgctaatgaatattggttgagaattaatccgtcatttctggtggaatgaggaagtagtggtgtatataagcagaagttgtttgaagcaaagcacagagcagttacagcaaagtaacatggctcaggctcagcttaacgagcaaaagagactgcaagaactattcacaaagctaaagagcgaagttaacaacggtgaaggacttgcctggctatttcaacaaaagacttacaccgacaaggacggaaaaccaaccaaagcaacaccaccactgagaacaacatcgtctgaactaaggtcagcttatgattctattgatgaaactttaacagcatctactgactgtttaactaatgatgaaaaacaattttgtaagctagttctaggaaagacgttgctattgcttgataaccatgtaagaagtcatagatgggatgctaacaaagtaaactttatttggcagatagaaaaaggaaatactaataaacttcatattcactgttgcttaggttactttgataaggatgaagatagtaaagacactcaaaaatcattaggttggtttgttaaaaaattaaataaagatataagttttatctatagtagctaccaatgtgagaaacagaatattaaagatgccgaaagtaaagcaagtaacctagatgtgtggatgaaagacggcgttgttaaaccttacaaatactttaacaagcaaaccaaacaagaatataacaaaccaattaatatactagaatatacagtaatatacttgtttagtaaagataaaataaatgaagaaactatgagtggttactatgctagtggcaatggtggaattattgacatgctgactgataaagaaagaaaaactttaagaaaaatgtacttagatgaacaaacttcagatatattacaagatggcgatgactgggatgtcagccaacaggcgccaaaagcaaccgaccaaattgactcagcaacctcaagaacaggaactaacttaatttggaaatcatgtgctactacagtaacctcaaaaaggaatgttgctgaaccaactaagcaaccatctaaaaaaatgtgctcagctcaaagtactttagaagaactatataactttggttgctttactcaagaagacatgattttaaagatgagtgataggtaccttgaaatatctttagaatcaaacgggcctcaaaaaattagcactttgcttcacatgaaccaagtaaggacatcaagcatacttactgcctttgattgtattaaaaaatttaatgaagatgaaaatgaccaacctttactagcaaccttaaaagagatgggacttaatgaaaaagtacttaaacaagtattaggtaccgttttatctaagcaaagtggcaaaagaggttgcatttggttttatggaccaggaggtactggaaagaccttgctagcagcactactatgcaaagcaacattaaactatggtatggttactacaagcaatccgaacttcccatggactgactgtggtaatagaaaccttatttggcttgaagaatgtggtaacttaggtaactgggttgaagactttaaagccattactggaggtggtgatgtaaaagtggataccaaaaacaagcaacctcaatgtattagaggaaatgtaattgtgacaagtaacaccaacattacaaaagtaactattggatgtgtagaatccagcgctcatgttgaaccacttaagcaaagaatggtaaaggtacgttgcatgaatcaaatcaaccctaaaagcaaaataacaccaggaatgttaagaaaatggctagcttcctgggatggaataccaatcaaactaaaccatgaaatgcctgacctttacttaggtaagtacatcatggtaagtaacacatttttaaataccaactttaaaactaacatatacttataagattactttactttacagaccacgagactactggacaaaactcgagtgccacaactgccaggaacattactggcaacttacaacctactactgcagagactgcagaagctgcaggcacaacaaactccgatacacaaaaaaggaatgtgagcagtgtgcctcagaagcagcacaagagacctcggcatgagtaaaagtaagtaacattcttaaagtaatctaacattataatactttactttacttatacttataaactttactttagttcctcagcactttcctggaaaaaagagaagtgctccaagacacgtgtttattcaacaagcaaaaaaaaggaagcaaactaaccctgcagtttttcacggagaagacacaatagaggaaatggattctactgaacctgagcaaatggacactgagcaagcaactaaccaaactgctgaagctggtggtgggggtggtggggttggtaacagcaccggcggctttaataatacaacagaatttaaagtaataaacaatgaagtatatattacttgtcatgctactagaatggtacacatcaaccaagctgacacagatgaatatgtaatatttaatgctggtagaactactgatactaaaacacatctaaaaaaactaaacttagaattttttgtatatgacgactttcaccaacaagtaatgacaccttggtttctagtggatagtaacgcttggggcgtatggatgagtcctaaagactttcaacagatgaaaacactatgtagtgaaattgagttggttactttggaacaagaaatagacaatgtaactataaaaactgtaacagaaaccaaccaaggtaatgcatctacaaagcaatttaacaatgatttaactgcatctttacaggttgctttggatactaacaacatattgccatatactccagctgcgccattaggggaaacactaggctttgttccttggagagcaaccaaaccaacccaatatagatactatcatccatgttacatttacaacagataccctaacattcaaaaagtaggacagcaactagattatgatgcagttcaagatgattaccttgctgtggatgaacaatactttaactttattactatagaaaataacatacctattaatattcttagaacaggagataactttcatacgggcttgtatgaatttaagagtaaaccatgtaaactaaccttaagctaccaaagtacacgttgcctgggtttacctcctctatgcaagccaaaaacagataaaacacacaaagtaacatcattagaaaacggaggtgacgtgcaatacttacaggaagcaaacaatatcagactaggtcacttttggggtgaagaaagaggtcataaaaacgcagaaataaacagagtaagaccttacaacataggttaccaatttcctgaatgggtaataccagcaggattacagggtagttactttgctggagggccaagacagtggagtgacacaaccaaaggtgcaggtacgcactctcagcaactccaacaaaactttagtacaagatacatctttgatagaaatcacggtggagataatgaagtagacacacttagtgcaatacctattcatgaaagaaataagtactacacagagagtgaaatagaacatcatacagcaaagcaaccaaagttaagtacaccacccatacatcactcaaagatagattcatgggaagaggaaggttggcctgctgcttcaggaacacactttgaagatgaggtcatatacttagattactttaacttttctggtgaacaaactctagactttccacaagaactattagctgatggtgctcaaatgaaaaaactacttaactcatatcaaccaaccgttggtcaagacaatgttggtcctgtatacccatggggacaagtatgggacaagaaacctgacatggatcacaaacctagtatgaacaacaacgctccctttgtatgtaaaaacaaccctccgggtcaactctttgttaaactaacagaaaacctcactgatgtattcaactatgatgaaaatccagacagaataaagacctatggttactttacttggagaggcaggcttacactaaaaggtaaactaagccaagtaacgtgctggaaccctgttaaaagagaactaataggagaacctggtgtattcactaaagataactatcacaaacaaataccaaacaacaaaggtaactttgaaataggattacaatatggaagaagcactataaagtatatatactaaaataacataatgttacatgttactatattactatgttactgtaataacttataaataaaagttacataaaaagtgatcaacctaaatactgtgtacttccttatttaaccagaaatgacggattaaaataaacctacattctatactatataactaacatctaatatactaatactataggttactttgctttgaaatactgatgtaggaatacaaaatactaacattaatatatatactaacatctaatactaacctaacactatggccattgtatgcattgtcggcttcgccgacaatgcatgcaatatatggccatagtgttaggttagtattagatgttagtatatatattaatgttagtattttgtattcctacatcagtatttcaaagcaaagtaacctatatagatgttagttatatagtatagaatgtaggtttattttaatccgtcatttctggttaaataaggaagtacacagtatttaggttgatcactttttatgtaacttttatttagaatttattacagtaacatagtaatatagtaacatgtaacattatgttatttt

SEQ ID NO: 277 - DNA, 5212 bp, Rat bocavirus
  source 1..5212: mol_type = genomic DNA; note = Rat bocavirus / Bocaparvovirus rodent 1 - NC_029133
acaggaaatgacgatactctgacgtatgcagtaggtggcgccagagagtatataagagaacgaatacggaagttcatcctctttcgacggagatctcgaccagggtgagtgccggcataatgggctctgaaaacctcgatatatcgaacgatcccgggtttatcgaaacactgcgcatgataaaacgattcgaagaaccatgttttacgtatgtaatgaaactgccgtatgaagatccgagcttatgcgagcctggcttacaattcctgctgcgcaatggcatatgggaagatatgctgcattcaaaaacctattatatggagaattatagcgaacacagtccacagatactctatactgcacattatggctacacactaggcacattcagctactgggcatgcgaacgtacatttagaaatagacagcagacaagccaaccaaaattcgattcctatgtacaggtagagatctcaaaatctatccacgtacacatagtcattggaggaaaaggtctaactaaatacacagcaaaaagcttcagaaaagatctagggatacaattcttcacacaaatagaacaaagattcaaagagagcttaggcgaagactatggaaagccacagtgggaacatctcactaaaccaattgagacagccagaagacaatgcatgaacggtgatcctacactagtaaccattctgcagtacacttcacgaagaggagaaacttattcatgtagagtagatccaaaaagtttcattcgaaactacttgctacctaaaaatcttctcatgaacacatacacaacaccagaaacacacacaccaacaggcaactggtttgccggaacaggaaagacatattctatgacattcatcaaggatcaatttatagatccaacacacaggagacctctcattgaagcactagacaatgacttcgcagttccaagctctggacctgttcatacaggagacccaggaggagaactgcccaaggtaagcagagcatcatggagtaatacagctactccagggggtaaaatgaacaaaagagaagcactagctttagacctagtccaaagagcacacgatgaaaatctactcacctacgaagatctcgtggctaaccatccagagttagtcatcatgatagagaatcaaccaggaggagataggatgctacaaaacacactacacatgattcacgtccaactcacacaacgatacacagctctcacatacatacaaaaaagattcgaagatgcagaagtcgaaacagacaacaaagtggtccggcttctaaacatgcagggatacaatccatggcaagtaggacattggatatgctgcatgttagacaaaaaagctggaaagcaaaacacagtctgtttcttcggtcctgccagcacaggcaaaaccaatctagccaaggcaattgtaaatgcagttggactgtatggatgcgtaaatcatcaaaatagaaatttcatctttaacgattgcgcagctaaacttatagtctggtgggaagaaggactcatgcatcaagactgggtagaacaagctaaatgctgtctaggtggaacttctttccgcatagacagaaaacacaaagactcacaagtcatgttgcaaacaccatgcatcatcagcaccaacaacaacatgtacgaatgcacaggctctaactatgtcacacaagtacatgctaaacctctcaaagatcgaatcgtacaaataaactttatgaaaccactgccgagcacatttggagaaatctccacagaagagtgtgcaggctggctcatggattgctgtcgaatgtttcaatgcacacttgagggcttctatgagagatgggaaattgagaaaatgcctaatgactttccactgggcaaactatgtgcatctcactcacaggactttctgctccaagaaaacggtatctgtattagctgcggtggctacctgcctcttactactgatactgaatctgcttcaacttctgaacgagacgaccctggtgagtacatacaaatccttaactaaaactattcctgaaatcattcacaaatcactcactgtgaacatctcttccagttcaaggaacatcaaaaagagctgcagatcataattcaggcgatgagccatccacaaaacagcagcgactggattctggaagagaactaactccacctgatccatacaaaggagcagaaagcaactggactttgcaagaggtaagagacgaactaaactcatacctcacacttcctcacgatgaacaggacaaacggtggttacgctggcttcaagaggaagagaggcgactctccgaggccagagcagaagaaaataccacaccgaatgaatggggagaaaggatcggatgcgtctcacaacctaacacagaaccaacagtcctctactgctttgagaccatgccggactcctcagacgaagaaaaagaatgaaaaatacaatccatatcacatcttctctaaacacaatgctattcacaatcctggacttgggttctgtgggtatcactggcacagcacgaggctagctcgagctggcacagaaatgattttcaatggctgtaaacaaaaattccaagaatatcaaaatgatggacaaataaactgggaacaaactaaggaaatactgtttttcctaaaaaaagaaatggatcaaaaatacagaaacatgctgtggcactttaaaaatacccaatgtaataagtgtgactactgggacaatgtctttactcgcttcactgctaacatctctgaatctccacaggacgatccaaccgatgaggaatgcttaaaggcagccatggatgtagatggctccagtgaatagaaagcccaaagggtgggtgctaccagggttcaaatacttggggccatttaatcctatcagatcggggaaagccaagaatcgtgtggaccaagctgctcttcgtcatgattatgcttatgatcgctatataaataataaagttaatccttattttaaattcaataaagctgatcaaacctttttaaacgatctcgagtcagactcttctgtcgcgggttacctagcaaaaggtgctttcaaactaaaaaaatacctagctccagacctcaaggaaccagagctgggtccaggcaaaggaaaaacaccagctaggaaaaccgcagctgcccagaaaaggcatctatactttgctagattagccggtggaaaaaaggctaagacaagccagatggcagacggaggcgaaagcagtaatgctaacgcaggagaagggacatctggtggaggtggatcggggccattggccctaacaggtggcagccgtgccggaggcactatcggaggaggtggagcaggaagcgtcggcttcagcacaggaggatggacagctggcacatacttttctgacaacaaagtagtcacgaaccaaacaagacagttcttgactcctatctataatgggcacacatacaaagctctgcaagcagatgatctcaccaatgaaaacgacaagtcaaagtggaacggtatcaccactccgtggggatacttcaacttcaactgctatgccagtcacttctctccacaggactggcagagaatgtgcaacgaatacaagagatggagacctaagagactgagagtgcagatctacaatctgcaactcaaaaccattcaatcgaatggtgctgatacacaatacaacaatgatctgacagcagcagtccacattctcgtggacggctcgcatcaatttccatgggctcaacatccatgggatgacacttgtgcaccagagctgccttatgtcatatacaaaacacctcagtatgcttactttcagaacctagcaggtctagctaacaacgtagggaccaactcagctaacaaattcctgaaaatgaacacaccactctatgtgctggaaaccatgtctcatgaagtactgagaacaggagaagacacgagcttcgaattcgaaatgagctcagggtgggtggacaatcaaactaatttctgtccaccacaactggatttcaatccactacatgacaccagaagggtagcaccaagagcaaccaacaacacaacacaatatgctccatatcctaaattcaaaaaaccaagcaactgggtaccaggtccaggaatggcttatccaggcagaggtgaagcagacggcaagagacctgctccaatgaccgtaacacttaggccaaacacattcatagatgcaggcaataacacaacagacagattccaacaagctagctatcaagaatggaaaccaacagatgacacaattataggtcagtctattaatgtaggacctatcaattgtgcagccactgatccagatgcagtcactactgcagcagacgctgaagatgatgtagctaatcctaacactgacaaggtatcctcacacagatacagcatagacatgactcgatggaatgccatacaaattaatgtcagaagaaacaatggcactccagaaactactcagatctacagacactatctctatcctatgcaagcatggaacagcaaccagattgacagatacactccaatctgggacaaagttccaaacactgaatggcacactatgctggcttcctcagatggcacactgccaatgacacatcctccaggcactatcttcatcaaatgctctaaaattcctgtgccgagcgaaaataacgcagacagctacctgaacatctactgcacagggcaagtcagctatgaaattgaatgggaatgtgagagatacaacaccaagaactggagaccagaacttagggtcgatccaaagaactggaccgatcctaacaactacaatctcaacactcaaggaggctacatcgtcaatgaagagctctacgaaaccatgccgaccaagatcgggatcaacagggttaactgaaaaattttcccgggaaaaaagcacatgtcaatcaataaagccttttaatatgctaattaagtatacgcctcttttgtcacgcctactcaagaggggcaaggggaggggagcaaagaaaaaaggggaggggaaaggacacgcctactcaaccaggaaggttgttataactttatatgcacatgcagcagtagtatacgtcacaatcttgattacatgccaggtgcaatttagttctgtcctagttcta

SEQ ID NO: 278 - DNA, 4634 bp, Rat bufavirus SY-2015
  source 1..4634: mol_type = genomic DNA; note = Rat bufavirus SY-2015 / Protoparvovirus rodent 3 - NC_028650
gcaactaaccaatcagacaaactattgcgtagtcacgctccgtaggagcgagcgtagcgagcgcgatgacgcagcaattgtgcgtctgattggttagttgcttgtcagctgataagcaacatcatttccgattcactacatccggtaaaaactgcacactcatttcaaagatggcgctaccggagaaagtcagaaacgctactgcttggttagaacaacaaaaagacaaaactgcactaagttttgtcttcaaaatacacgatactttcttcttaccatcaccaggagcacaaccaatacaagtaacatggcgacactacaaaaaaccaagcaagcaacaagatacatcagatgtatatcatctagacagagaagcgctacaaagaagagatccagaaacagatacagaatttgatgtgagtacagaaccttggttgcatgctttggtactaacaagtctagttaaaaagacattatttgattactttaaacaaaaagcattaaatccagaagatgttagttggtttatgcaaagtgagattggaaaagatacaggactacatattcacctgatattacacagcgaaaaaattaatacatctagtggaaaatggatatgtaaattctttttagacaaatggagcttatatctctgtgcttcagtagacttaccaagagaacatacaacgccattcttcagccaaacaaaatttagacacacagtagaaggcgatgaatgggtacaagtactacaatacactcaccaaactacacgaaaagcatatgttaaaccagtaaaccttgctagcatcatctacaactactttctaaccaaaccaatcatcaaaaaagcaagtgactttggttacttatacagtagtgatggagcatttttattcgatgacatggatatgaaaactagacaaaccatagcaaaaataatgcaagacagagaccaaggaaaagaaaatacagaaatagaaactgttaaaccacaggacaaaaagaaaaaaagagtagaaacagcaaaagaaataactataaaagaaacaattaccacactaacagctaaaaaattacacacacaagaaaaatggatgctacatgaaccagatagctacatacaacaaatagctaatccaggtggagaaactataataaaagcaacactagatatagttacattaaaaatgtcagtagaagaaacagcatatacactaataatacaacaagaaccagatgcaaaaataaaaatgaaaaaaactaaatcatggaacattttaaaaaataataatatgaatccaaaaaaagtatttcatgcaattatgtgctgtctaaacaaacagatgggaaaaagaaacacaattctactttgtggtccagcaagtacaggaaaaagcttactagcacaaaaaatagctcagttagttggaaatgtaggttgctacaacgctagcaatgtaaactttccattcaatgattgtagcaacaaaaacctaatatggatagaagaagcaggaaactttggaactcaagtaaaccaattcaaagcaatcatgagtggtcaatcaatcagactagaccaaaaaggcaaaggcagcaaaaccatagaaccaactccagtaattatgaccacaaatgaagacattactaaggtcgtggtagggtcagaacttagacctgaacacaaacaaccaatcatggacagatgtatacaaatacgcttaaccacaagacttcctggagactttggtttacttaataatggagaaattccaagcatcttcagaagactagaaagaaaaggctacaaaccaaccttagcaagttactgtcaaaaatggggaaatccacctagttggtcagaaaattggaatacagaagaaaaaaacctagagaatgacagtgacgaagagaataaaactcctgcagaaactaaaaaacctttagttgaggtcttagatccacagagagaagacgcagaaatcagaaacctcctcactggcttagaagagcagtggtttcaagaagaacaacagctgatggacatggacctatcacaagacttgatgggagacgtcaatgcctacactcaaagactttaaaaacggtaagtaaatactgctacatactaactaacctttcaccatggaatacagagaacgaaacctaatacttttcatgacttttataattacattactaactggatttaactgcatactacttctaagcaatgcactttatggatactggccttttattaattcacaacgaactaaccaacttattctatttggaataggactttgtatattaacgatgattacttggacaatcgctataatgtgcttcttttttttacaggcttaaccctaccagggtataactacctaggccctggaaatacagatttcaccaaaaaacctactaatccatctgacgaagcagcacgacgacacgacctagcatatggaagctatataaaaaaaggacacaatccatatttcaacttcaacaaagcagataaatccttcataaaagaaactgaccaagcaaaagactacggaggaaagcttggaaatttattcttcagattcaaggaaaagatagcaccaactctaccagaagaacctccagcaaaaaaacctaaaccatctacatccaaaccaatctcctacagctggaaaaacctaaaacaaggagtcacaaaaggtaaaccattctacatatttgttaatcgcgccagaaaacaacgattgatggacggaggtaccagcaacgacatccaagatgaatcaaaccaaccaaatgcagatgcagctaacgctggaccatctggaggcggagggggcggcggagctggggttggtcattctactggtaattttgataaccgtacggaatttgtatatgaaaatggggaagtcactatcatctgcagagctacgcgactggttcaccttaaaatgtcagactccgaggaatacagaatctaccagaccactaacggagaccaattccccgtcgactacgaggacgcaggaaaaacaacctacgactcattccatgctgaatgtatgacaccatggttcctagtcaatgcaaacgcatggggatgctggatgtctcctgcagacttccaacatatgtctaccatctgtactgaactctccattgaaactttagaacaacaaatagacaatattgttgtcaaaacagtaaccacacaaggtacaggacaagaacaaatccaactatacaacaacgacctaactgctctagtccaactagcactagacaaaagcaacatgctaccttggacatctgacaacggttactgtgaaagccttggcttttttccatggagacccagcgtacccaaaccattcaggtactatgttaattactataacacaatggtaataagtccaccaagaggacctcaaacttcagggggatgggtacgtactagacaaggtgtagactatgataatgtacaatttattactgtagaaaatcatgtacctattgacttactaagaactggagatagttggtatagtggaaaatataaatttaactgtagaccaactaaactatgttatcactggcaatcttctagacatattggaaatcctcacccaactgaaccacctaacacagttggtggacttggtacaattctttctcaaggagttactggttggcaatggggaaatagaaacagtccaatagcagatgctacaaaagtcagagacttccacataggaatgagttttccagaatggtatgttcactactcttctggaggacctgtaataaatccaggaacatcattcagtatgctaccatatgttagaccagatgctccatacgatggtaactacaacgaaggagctagtagaaaaatagtatttgactatggtcatggaaacagtgatccaggacaaactcaatcagtatggatgccagatgtcagagaaactggccaaactgactggggtcctagagcaatgattactgcaagcatagaaaacagacctccaaatggtcaattagatcctggacacgataacagaggctatatcactcaacaattcactactaacacttactcaccattcacagcagtagattcagtaggacctatttacccatggggagaaatctggactaaagttccagacactgaacacaaaccaaacctaagcgcacaatccacttttatgtgtgaaggaaacgcacccggtcaattacttataaaacttgcacctaactacacagacgaagtcactatgactggagcacaaacaaaaagaatagtcacttatgctactatgtggtggagcggagttctcatattcaaaggcaaactcagaacaccaagacaatttaacacttataacatgaaaatagaaaaaggctatatagaaagaagcgaaatgattcctaactcagttggttcaatagaactccctggaatgcatgcacgatacttacctaatttcacttgttaatatcaacctaccaacccatgtactggaccaaaaaaataataaaatctttaaaactcaactaaagtctctttcttattgggaaaccaaccatatagatctaagtgtattttaggg

SEQ ID NO: 279 - DNA, 4936 bp, Rat parvovirus 1
  source 1..4936: mol_type = genomic DNA; note = Rat parvovirus 1 / Protoparvovirus rodent 2 - NC_038545
atcatcttttagaactaaccaaccatgttcacgtatgtgacgtgatgacgcgcgctnnnnnnnctgccttcggcagtcacacgtcacaaacgtttcacatggttggttagttctaaaagatgataagcggttcagggtttaaaccagaggcgggaaaccacagagggcgtggctaaatgtatataaagacaagtcagtgtcagttacactcactctctctttgcagacagagataccggagctctttagcaccatggcaggcaaccagtattccgaggaagttctggatggagtcaattggttgaaagaccaatctgacacagaagcattctcctttgtttttaaatgtgagaatgtacaactgaatggtaaagatattaactggaacaactacaacaaacctctcaacaacgaggagctgacttctctcatcagaggggctgaaacagcaatggaccaggcagaagatatggaatgggaatctgaactcgatcaactcaccaaaaagcaagtacaaatatttgatgctttggttaagaaatgtctatttgaagtaatacttaacaagaatgtagcacctaatgactgtggttggtttatccaacatgaatggggaaaagatcaaggctggcactgtcatgtactgttgcacggtaaaggactgcaacaagcaatgggcaaatggttcagaaggcagatgaatgtactttggagcagatggttggtgactgcttgttcagttaacctttcaccagcagaaagaattaaactgagagaaattgcagaagacagtgaatgggtaacagtgcttacttatagacataaacagaccaagaaagattatgtgaaattggttcactttggaaacatgattgcctattacttcatgacaaaaaagaaaatagctagttctcctccaagagactctggctactttctcagcactgactctggctggaaatttaactttatgaaagaggcagacagacacttggtcagtacactttatactgatcaaatgaagccagaaacagttgagaccacagtaaccacagcacaggaaactaagcgcggcagaattcaaactaagaaggaggtgtcaatcaaatgcacgctgcgcgacctagtggccaaaagagttacttcaccggaagattggatgatgcaacagccagacagttacatagaaatgatggctcaacctggtggagaaaacttgctgaaaaacactctagaaatttgtactctaactttggccagaacaaaaactgcttttgatctaatacttgaaaaagcagaaccaagcaaactaactacttttgtacttggagacacacgcacatgtagaatttttgctggtcatggatggaactatattaaagtgtgtcatgccattgcttgtgtactgaacagacaaggaggcaaacgaaatacagtgctttttcatgggcctgccagcacaggaaagtcaattattgctcaagcaatagcacaagcagttggtaatgttggttgttacaatgctgccaatgtgaactttccatttaatgactgtaccaacaaaaacttgatctgggttgaagaagctggtaattttggtcaacaagttaatcaatttaaagccatctgttcaggccagactatcagaattgaccaaaagggaaaaggcagcaaacagattgaaccaacaccggttataatgaccaccaatgaaaacataacagtggttagaattggatgtgaagaaagacctgaacacacacagccaatcagagatagaatgttgaatattcatcttaccaacacattgcctggtgactttggtttggttgaaaagcaagaatggcctttgatctgtgcatggttggtgaaaaatggttaccaatcaaccatggcaagttactctcatcactggggcaaagtgcctgactggtcggagaactgggcggagccagcgatgcaaacgcctataaattcaataggttcggcacgctcaacatctcaaacggcaaccagtactcctctgagccagaactacgctctcactcctcttgcttcggacctagcggacctcgctctggagccttggagcactccaaatacacctgtggcggaacctgtgacaggttcgaacaccaacactggtggaagaaactctcaaactgctcgagcgagcccaacttggtcagagatagaagcagacttgagagcttgcttcagtcaagaacagttggagagcgacttcaacgaggagctgaccttggactaaggtacgatggcacctccggcgaagagagccaggagaggtaagggtggttgggttgggtaaggcatgggttactaaacttatatgtatattacaggtattctattacttggttttaggttgggtacctccgggatacaagtacctgggacctggtaacgaccttgaccaaggagaaccaactaacccttctgacgccgctgcaaaagaacacgacgaggcttacagcaaataccaagcttctggcaagaatccttacctgtacttctctcctgctgatcagcgcttcattgaccaaactcaagacgccaaagactggggtggtcgaattggtcactacttcttcagagctaagaaagcaattgctccaactctcactgactctgctggtaaatctggaccttctggtgtagctagacctggtaagaggagcaagcctcctgcacatatttttgtgaaccttgctaaggctaaaaaaaaacgtgcttctcttgctgcacagcagagaactcagactatgagtgatggaggcgaacagcaacaggacaatgctgcacagtcagctgctagagttgagagagcagctgacggcagtggaggctctggtggtggtggtggtggtggtaatggtggtgttggggtttctacggggagctttgataaccaaacgcactatgacttccttggaggggggtgggtccgtatcacagcgtatgcttcgcgacttgttcatataaatatgcctgcttctgaagagtaccatagaatttttgttagaaataatactgatactggtcaaaagggaaagatgtctttggatgatgtgcacacacagatctggactccatggagtctggtagatgctaatgcatggggctgttggtttcagccaagtgactggcagttcattcaaaactctatggctgaacttaatcttgaaacatttgagcaagagatttttaatgttgtgcttaagacagttactgaacaaaacagtggaggtgcagatgctatcaaagtctataacaatgacttgacagcttcactcatggttgctttggacagcaacaattctttgccttacacaccagctgcagctaccagtgaaactctggggttctacccatggaaaccaactgcaccagctccatacaggtactacttctatgtgcctagaaatctttctgttacatatcagaatgacacagatgctgtagtggatcaagtaaaccaaactgatccatacaactctcgctttttgactattgaaaacacaactccaatcaccttgctgagaacaggtgatgagtttgctactggcacatacaagtttgaatgtgaacctttgaaactaactcacctttggcagaacaacagggctctggggatgcctccattgctgggagcactgccaccaaatgacaatccaatcaacattcaaaaaacagcaagcaacaggtatggtcagtctcagatacaaggctctaacatactttctgaagtaactagactgagaccagtacagattggttttgctcaacctcatgatgtttttgaagccagtgacagtggccctttcaaggtgcctctgattagcatgttcccaacagacggtgctgaccatgatggaaatggaaatgtcagatacatgtacagcaaacagcacggggctacctatgcacagcaggctgctgactttgttgaaaggtacacctatgatccagcaggaactgggggaagaaactacaactatggctggactcaagatgtgccgtgggtgagtcagcctgcacaacagcaaatacttacacacaaagacccaataggcggtaaaaatggtgttcatccacagaacatcatgaatacctatgggcctttgactgcatttccacacacgataccaatctacccacaagggcagatctgggacaaagaggttgatttggaacacaaacctagactgcatgctaatgctccttttgtttgtaaaggcaaccctccaggacaactttttgtcagacttgcaccaaacctgactgaccagtatgatcctaacagctctaacctgactaggattgtaacctatggcacattcttctggaaaggcaagctgacttttgtagctaagatgagaccaaaccagacctggaacccaatacaccagatcacaacttctcgtggtggatctggcagatatgatgacataaccaagtggctgcctacacctacaggacacatgagaacagatcctctgcttacagcacctattgctagaaacatctactaactaaccatgtttctttctttgcttcacataatacttaagacaataaaaatacaacatagaaatatagacttacacatacagatactagatggtaggttggtaatatggtatagattaactgttagaaataatagaacttttggtataactagatagtcaatactgttagatagaataaagaagataatgtaatgggataatgtgggtggttggttggtttgcccttagactcgatgttaaggaccaaaaaaataataaaatctttgaaaatgaacaaggactactgtctattcagttgaccaactgaaccatttgtatcaatatgtctttaagggggggtgggtgggagatacttacagacctatagaccggtttggtattgg

SEQ ID NO: 280 - DNA, 5456 bp, Red-crowned crane parvovirus
  source 1..5456: mol_type = genomic DNA; note = Red-crowned crane parvovirus / Aveparvovirus gruiform 1 - NC_040672
cagctgtctggcgactgaggagctcctccttttatacgcaacatatgcacagtcacggtgaccaatcaggttacacattaacagtcacgtggttaatcattaaccaggccatctggcaggatatgatgttcttgctttctaccaatcatccatcctccatccaccattatccattagctccaccctctagttcagcggcgaagccgcgcccttcgggcgaacgtcgagggtggagctaatggataatggtggatggaggatggatgattggtagaaagcaagaacatcatatcctgccagatggcctggttaatgattaaccacgtgactgttaatgtgtaacctgattggtcaccgtgactgtgcatatgttgcgtataaaaggaggagctcctcagtcgccagacagctgctgacttgttcagagctcgaactggccgctcttttcggagccggatccggatctacgtggtcgctgtctcagttcctgccgaacctctctgccggtaagatgagccttccgactcgcggcggtttcacggcggttttcgcgcttcccgactgcattcaggtcgaaaagaaaatttttgacctgcgtgccgccgcgaacgcgggctacacgaaccccgagacgggcgaattcgtgtgcagccgaatgccggtggaccacgagctgcaggaggaatataggaggtttcacgagaacccgaattgggatcattgcgaaagcccgtggctccaggttcagcagaagctgctgatgagcgcggtgcggatagagacctcgatgcagcctcacgccaagatattctggcaggccgaggaatctaccaacggcaagatccactttcacgttctctttatctccgggttcacgtccaagaacatttcctggacgatgaaacggatgaggcgggaaatcgttaaggaggctagcgagctgtaccacgcttactgtcccgacatcaaaaaggcgggaatctggggagctctgaacaacatcagcgctgccatgctcagtctgaacaggggatactccccgaaactgggcaagagcatacctcagccggtgaaccctcactcgttcgcgaggtactacatgtacaacgaggggaaaaaggtgttatacaggtgggctacgcctaacctgatcgccgacgggctggtgaccagcaagctcaacgcgcccttcaccatggccgccgctcaggacgacgggcccgacgtatccgtcgagaccctcagaccgggcgacacgctcccggtctcttacgtgagtaccgaatcggactgggcgcgcggcagcggggacacggtgatacagaccggggtgatggaaaagctgtgcatggaggcgctgagattgtgccgagacgggtgcatttacaatctgagggatttcaaaatcagacatcccgacaaattcatgcagttcgggtcgcggagccaggggatacctaaactgactcaaactatccaactttacgtagacaccattgtttctgagagcaccgcctgggaaatcgctaagcaggttcacggggacgtggacgtcgattgtctcgacgataacagggtggttcagctctgtacttggcaagggtactcgccccggtacgtggcgcatacgctgctgtgctggctgtccggtaacatggggaaaaagaacacggtctacttttacgggcccgccaacacgggcaagaccatgatggccgagtccatctgcaagatggtcggcatctacgggaacgttaaccacaacaacggaaacttcccgtttaacgactgtcacggcaaggccgtgctgtggtgggaggaatgcaccatgaaggaagagtacgtggaggcggcaaagtgtctgatgggagggtctagcgtcagggtagacaagaagggggaagactcggtcctgatagaaaaaaccccgatggtcatcaccagcaacaacgacattgccgtggtcgcgagccggaacgcggtctccggcaatcacgaggcggcaatcagggcccgctgcctgaggttcaactttaacaagtggctgacctccaactggggcgcggtgaccgtcagggacatgtaccagttcctgagctggggagagaccctcgggtccccgaccctcgagacgtacttgcggctgaacgagaagtacgcggacaagctcccgtacaaccagccgaaaattgagctgtgcgatcattgtgtccaacagtttaccttccgggagacgttaactctgtgtccctcctgcggtgggtggacccccaagagtatctcgggggattcgacgagtggatactggaaaggggagagcgatcaaagcttgtacgacgcggtgcgttccgagcaggtatgtgcgaggatgctgtagagtctatacagcgcgtgtatcccctacgcagactaacagcctcctctcgcacataggacgtggaacttctagccgacggagaccgctacaagtaccagtggatcgagaagagagcgggattgactccgacccagagctgtcggaagagagaccgtcccgcgtctccagacagtacatccgctggtccctcgacctcgacaaagtgctcacgactgacctctgaggccgactcgacctccggctcgggtgcggacgggtgtaacgggattagcgttgtattagatggacgcgttggggcgctgggtggtcgtggttaccgggttgataatcggggtattactgttatcgaacgggatattgatagcccacctagcctcacggccttgttcgtggaagaatctgacggacgaggccgggggacacgagataacattgacacaagcaggcgaaacgcaccgtttcaacatatcgagcataaattgtgtaaacgtgctagcgaaactagtcggaacggcggggtgccagatcccaaagaaggatccgatatcgtgtccctaaagtgcgatgaacccatgcctgtgtcgcctcctccgaggactccgactcctctaccgaagggggatcggagtgctcagagcattggagctctgtcatgggctgatacagcaaatagatgggtggagagccatgtgggcagatggcgcatcgcttttagtctttttatgtcatggcatgaggccaatattgataaaatcgatagagttgctagtatggttacgggttcagaacgccttacgattctcagattactggcgccggtagtctgccactacaagtgcgccattaacctgagagaggccattatggagcacatggtacacagcgactggagcacggatgtaaacatcgacgtgcaattagagcagtgtatccgggtagcgcaatctgtcgagccgttcgggatatggcaatgtatcgatcggttggccgcattttgtaacgcgctcaatgtcccggcaggtgcgacagatggggaagtggactcaggccgattatgacgcgtacaataacactgtgtactggctaaataaatatttgaaaggccccaagataaacaacgctaaaaagcctcagcgtcagttgtccgataagcagaaggctgaccgtaaacggtattttatcacgcaggccaataaagccaagaaagagggcatcaagttcggtatccccagcaagaaagaccacgaatcctttttcaaaaatcaccagggggctggtaagaaggctacgcagaaaaccaaacatctcgatccgacgccggactcggatcctgacgagggtccggccccaaaagtaccaaaaacagacctcggaggaggctacaccgctgacgacctcgaggcggccatggatccgcgtaacgacgtcgagatggcagcggccgattcttcggctgatgctgcggtgcctatgtctgacagcccatccggcggaggcggaggaggaggtgggggaggcataggggagagcacggggaactggacttgtgaaactatatggggtagcaatagtataattacaaacgcttctagacattgcgtgtgtctgactagagatttcgataaatacaccgcgatcgggaataattcatttaccgaccggtacgataacgagaacgcgacgccgtgggtagggtggtccacgccatggaactatatcgatttcaaccaaatgtgtatacactttagccccagagactggcaacgattaataaacggcgccagcagatggaggccaaagtcggtgcacgttagaatattcaatatacaagtaatccaaaaaacaaccactgcagatggcgttcaatattcgaacgacctaacaggaacgatccagatatttgcagactctgccggtagatatcccagattaatgtatccatgtcagaccaccatgatgggcccatttccgaaccaggtgtactatctgcctcagtacgcgtacacgaccgcgtgcgacggaccacaaagcaaccagcagataaacgcgctgttaaatcaatatagcgcgttttactgcctagacgaaagcgctagcgcgatgttaagaacaggaaacgaatggtcgtgtcactacacgttcggggcagacaccgattgggtgcttaatagacgcagcacgatcccaataaacgaacgcgtcaacccgctgtacgatacatggcaagttaatctaagaggagacgacgccaaacgcggacatttcgcatcgtggcgtcaaccatggttaccagggccgtctatcagtataacagatagcacggcgtcggacgctgcactaagcgtaagctccggcgtcgcaatcgggcctagctatatggggatagtaccaggaccaccaatgtgcaggggggaatcgtcgaaagacgagtacctgcaaacgttctggatacctaagaacgtaggcatgaacgagggagacgttaagaacgcacaaatatcacctagcacagcgtataaaaagcaggtacccaccggcagactatgggaggtaaaccctagggggttgtatagagtaggaggaaatcagggagcgtcggaagataacaaatggtcaggctgcgtgccgggcatgatatgggatcgccgacccgcaacatatttcgatccgatatggcaggaaaaaccagaaacggacgacagcttcatgtacgtcagtcagatgggcggatgcgcggtcagtggagcccccggccacatcttcgtgaaaaacacgcccaaaccgacaggcgcgcagagcacgtacgtagacgaatactcgacattcacgataacggtaacgatggaatgggagtacgtgccacacacttacagccagtggaactcgtacaagacagtatcgaatacggaagcgcaagcgcaggcgtatctcggtatggtaaacgcgtcgggcgtatacgtgacggggatggacggggacaatccggtggagctgcacgtgacgaaaaatttacctcgcgtgaattgaaagtcgtataccggtcaaaacgtcgccatacgggctgtgtaattatataaat

SEQ ID NO: 281 - DNA, 5515 bp, Red-crowned crane parvovirus
  source 1..5515: mol_type = genomic DNA; note = Red-crowned crane parvovirus / Aveparvovirus gruiform 1 - NC_040603
cacattaacagtcacgtggttagtcattaaccaggccatctggcaggatatgatgttcttgctttctaccaatcatccatcctccatccaccattatccattagccccaccctcgacgttcgcccgaagggcgcggcttcgccgctgaactagagggtggagctaatggataatggtggatggaggatggatgattggtagaaagcaagaacatcatatcctgccagatggcctggttaatgattaaccacgtgactgttaatgtgtaacctgattggtcaccgtgactgtgcatatattgcgtataaaaggaggagctcctcagtcgccagtcagctgctgacttgttcagagctcgaactggccgctcttttcggagccggatccggatctacgtggtcgctgtctcagttcctgccgaacctctctgccggtaagatgagccttccgactcgcggcggtttcacggcggttttcgcgcttcccgactgcattcaggtcgaaaagaaaatttttgacctgcgtgccgccgcgaacgcgggctacacgaaccccgagacgggcgaattcgtgtgcagccgaatgccggtggaccacgagctgcaggaggaatataggaggtttcacgagaacccgaattgggatcattgcgaaagcccgtggctccaggttcagcagaagctgctgatgagcgcggtgcggatagagacctcgatgcagcctcacgccaagatattctggcaggccgaggaatctaccagcggcaagatccactttcacgttctctttatctccgggttcacgtccaagaacatttcctggacgatgaaacggatgaggcgggaaatcgttaaggaggctagcgagctgtaccacgcttactgtcccgacatcaaaaaggcgggaatctggggagctctgaacaacatcagcgctgccatgctcagtctgaacaggggatactccccgaaactgggcaagagcatacctcagccggtgaacccttactcgttcgcgaggtactacatgtacaacgaggggaaaagggtgctgtacaggtgggctacgcctaacctgatcgccgacgggctggtgaccagcaagctcaacgcgcccttcaccatggccgccgctcaggacgacgggcccgacgtatccgtcgagaccctcagaccgggcgacacgctcccggtctcttacgtgagtaccgaatcggactgggcgcgcggcagcggggacacggtgatacagaccggggtgatggaaaagctgtgcatggaggcgctgagattgtgccgagacgggtgcatttacaatctgagggatttcaaaatcagacatcccgacaaattcatgcagttcgggtcgcggagccaggggatacctaaactgactcagactatccaactttacgtagacaccattgtttctgagagcaccgcctgggaaatcgctaagcaggttcacggggacgtggacgtcgattgtctcgacgataacagggtggttcagctctgtacttggcaagggtactcgccccggtacgtggcgcatacgctgctgtgctggctgtccggtaacatggggaaaaagaacacggtctacttttacggtcccgccaacacgggcaagaccatgatggccgagtccatctgcaagatggtcggcatctacgggaacgttaaccacaacaacggcaacttcccgtttaacgactgtcacggcaaagccgtgctgtggtgggaggaatgcaccatgaaggaagagtacgtggaggcggcaaagtgcctgatgggagggtctagcgtcagggtagacaagaagggggaagactcggtcctgatagaaaagaccccgatggtcatcaccagcaacaacgacattgccgtggtcgcgagccggaacgcggtctccggcaatcacgaggcggcaatcagggcccgctgcctgaggttcaactttaacaagtggctgacctccaactggggcgcggtgaccgtcagggacatgtaccagttcctgagctggggagagaccctcgggtccccgaccctcgagacgtacttgcggctgaacgagaagtacgcggacaagctcccgtacaaccagccgaaaattgagctgtgcgatcattgtgtccaacagtttaccttccgggagacgttaactctgtgtccctcctgcggtgggtggacccccaagagtatctcgggggattcgacgagtggatactggaaaggggagagcgatcaaagcttgtacgacgcggtgcgttccgagcaggtatgtgcgaggatgctgtagagtctatacagcgcgtgtatcccctacgcagactaacagcctcctctcgcacataggacgtggaacttctagccgacggagaccgctacaagtaccagtggatcgagaagagagcgggattgactccgacccagagcagtcggaagagagaccgtcccgcgtctccagacagtacatccgctggtccctcgacctcgacaaagtgctcgcgactgacctctgaggccgactcgacctccggctcgggtgcggacgggtgtaacgggtttagctgtactcttaatggaagttttggggcgctgggtggccgatcggtatattgtgatcgcgggctacgcgttgtggatcctagcctgggtcctagtcttacagagctgttttgcgacggggaagatatacgacccgcgcggtcattacaaactagaaactcatcagtgcggggacgggcctccgggcgctccagtagtgaggtcgctgaggtgggggcagtgcacgactctcgacggggaaattcggtatcaccgtctgaccgggaaacgtcagccgccgttctcgccctaaagtgcgatgaacccatgcctgtgtcgcctcctccgaggactccgactcctctaccgaagggggatcggagtgctcagagcattggagctctgtcatgggctgatacagcaaatagatgggtggagagccatgtgggcagatggcgcatcgcttttagtctttttatgtcatggcatgaggccaatattgataaaatcgatagagttgctagtatggttacgggttcagaacgccttacgattctcagattactggcgccggtagtctgccactacaagtgcgccattaacctgagagaggccattatggagcacatggtacacagcgactggagcacggatgtaaacatcgacgtgcaattagagcagtgtatccgggtagcgcaatctgtcgagccgttcgggatatggcaatgtatcgatcggttggccgcattttgtaacgcgctcaatgtcccggcaggtgcgacagatggggaagtggactcaggccgattatgacgcgtacaataacactgtgtactggctaaataaatatttgaaaggccccaagataaacaacgctaaaaagcctcagcgtcagttgtccgataaacagaaggctgaccgtaaacggtattttatcacgcaggccaataaagccaagaaagagggcatcaagttcggtatccccagcaagaaagaccacgaatcctttttcaaaaatcaccagggggctggtaagaaggctacgcagaaaaccaaacatctcgatccgacgccggactcggatcctgacgagggtccggccccaaaagtaccaaaaacagacctcggaggaggctacaccgctgacgacctcgaggaggccatggatccgcgtaacgacgtcgagatggcagcggccgattcttcggctgatgctgcggtgcctatgtctgacagcccatccggtggaggcggaggaggaggtgggggaggcataggggagagcacggggaactggacttgtaacacggtgtgggggaaaaacagcataattacaaacgcttctagacactgcgtgtgcctgactagagatttagacatgtacaaagcgatcgggaataaggataacgggttagtgtttggaaccgaaaacaaaaccgcgtgggtcgggtggtcgaccccgtggaactatatagattacaatcagatgtgcgtccatttcagcccacgggactggcagcggttgataaacaccgccagtaaatggcgtccgcgttcggtccacattaaaatattcaacatccaagtaatacaaaaaactactgtgagcgacggtactcaatactcaaacgatctgacggggacaattcaaattttcgcagacgctcagggcagatatcctaagctattatacccgtgccaaaccacaatgatgggtccgttcccaaatcatatatattacctgccacagtacgcgtacactaccgcatgcgacgggccgacgtcaaatcaagacataaacgcgttacttaatacaaacagcgcgttctattgtctggacgaaagcccgagtgcaatgctgcgcaccggcaacgagtggtcgtgtcactatacgttcgacgacgacaccggctgggtgcacaatacacgttcgactataccaatattcgaacgtgctaatccgctgtacgatacttggcaagtagatctaagagggaacgacgcgttaagaggacatttcagctcgtggagacagccgtggctaccgggaccggtcataaatatgaccgacggaactgccgctggggcgaacctaaatacaatgccaggcgtagacgtaggggcttcgtatatgggaatagtaccaggccccccgatatgtcgcgcagaaaacgataaagacgagtacttgcaaacgttctggactcccaagacaatcggtcaaaacgaaggagacgttaaaaacagccaaataaatacaagtactgcgtataaatcacaagtgccaaccggccgattatgggaggttaacgcgagaggacagtataaggccgccagtagccagggaaatgtagcggaccaacaatgggcgggatgcataccgggtatgatatgggataggcgtccagctacgtatttcgatccgatttggcaggaaaaaccaataacagacgacagtttcatgtacgtcagccaaatgggaggatgtacggtcagtggagcccccggccacatattcgtgaaaaataccccgaagcctacaggaactgcgaacgagtatgtggacgagtactcgacgttcacgataacggtgacgatggaatgggagtacgaaccgcacagtttcagtcaatggaacaactacaagatgatatccaacaacgaatcgagcgcacaggcgtacgtcgggatgtgcaacgcgtccggtcagtacgtgctgaatcacagcgcagggcagttgccagaaatgtggattaccaaaaatctgagtcgtgtaaattagacatacactacgaacgtaaacgtcgccatacgggctgtgtaattactgtcacttatacatatctgacgctgcctacgatctcccctgtgtagatctcggaggtcgccgtcttcatcaatactacagtgactgcccttctcgtagtgtgagtggcttcactacatccatcacttattccaat

SEQ ID NO: 282 - DNA, 5342 bp, Rhesus macaque parvovirus
  source 1..5342: mol_type = genomic DNA; note = Rhesus macaque parvovirus / Erythroparvovirus primate 3 - NC_038541
tgcgcggtctatataagttcgcgacaacccttgagctccccgcttacagcgaaccctagggctggcaccgagccaagttcaggcgccatctttttttttgatcgacagctgacgtcaccggatattgcgttacaggaagtgacgtcacaggaagtcccgccttagaccggatgtcccgcctcccggcggcggcggcggcgctattgatttggtgtcgttctcaaggggaagcggtcggccattttaggtgtcggccattttgttgtttacttgtttttcattggctgctttaaataaggcgccattttgattggctattactgtctatataagcaagaaaccaggaagtatctgtctctttgcttgctgttgttcggagagaacacatctcgctacttgccttctaggtaactaatttaattaactcttttactaacaatggacatgttccggggagttattcaactgactgctaacattactgactttgctaacgatagctggtggtgtagctttttgcagttagattcagatgactggccggagctgagaggtgtcgagagactagttgctatttttatttgtaaagtagctgctgtattagacaacccctctggtacatctcttggctgtaaatattttttgcaggcagagggtaatcattatgatgctggttttcatgtgcatattgttattgggggacctttcattaatgctagaaatgtatgtaatgctgttgaaactacttttaacaaggtgctgggagatcttacggatccttctatgtctgtacaatttaaacctgctgtaagcaaaaagggagagtattacagagatggttttgactttgtgactaactacttaatgccaaaactgtatcctaatgttatttactctgtaacaaacctagaagagtaccagtatgtgtgtaattcactgtgttatagaaagaacatgcataagcaacatatggtgtctactgtagatgccagtagttctagttttatgaatgatatgtatgaaccagctacaaaaagaagtaaaagctgtacagtaaaaggagagaaatttcgtaatttagtagacagtctcattgagagaaatatttttagtgaaagtaaatggaaagaagttgattttaatgagtttgctaggcttagcgcctctgtggcaggagttcatcaaattaaaacagccattactcttgcagtgtcaaagtgtaattcaccagactatctgtttcaaattttaactagacccagtactattcattttaatattaaagaaaacaggattgctcagatctttttaaacaacaactactgtccactgtatgctggagaagtattcctcttttggattcaaaagcaattaggaaaaagaaacactgtgtggttgtatgggcctcctagtactggcaaaacaaatgtggctatgagcttagcgtctgcagtgcctacttatggcatggttaactggaataatgaaaactttccatttaatgatgtgccttataaaagtttaatactgtgggacgaagggcttattaaaagtacagttgtagaggcagcaaaaagtattctgggaggtcaaccatgtagggttgatcaaaagaataaaggcagtgtagaagtcacaggcactcctgttcttattaccagtaacagtgacatgaccagagtggtgtggtatacggtgactttagtgcatcagcgagcgttgaaggatcgcatggttcggtttgacctgactgtgagatgctctaatgctctgggattaattcccgctgatgaagccaagcagtggctgtggtgggcacagagtcagccgtgtgatgcatttacccaatggcaccaggtcagtgagcacgttgcttggaaggcggaccgtacaggcttgttccatgacttcagtacaaagccggagcaggagtcaaacgcaaagtcaagcggaaaatcaaatgactcctttgcaggaagcgacctcgcaaatctctcctggcttgacgttgaagatacctcgagctcttcggagtctgatctcagcggggacattgcagaactcgtctccaacgacaactggctccagagtggctgtcccccgacccggtgcagcaccccagttacagtggttgagccaaagcaagtttcccccggaaccggaggaggattaacaaagtgggaaaaaaattattcagttcatcaagaaaatgagctagcatggcctatgtttagtgtagactgggtgtggggttctcatgtaaaacgccctgtgtgctgtgtagagcatgataaggaccttgtactgcctcattgtaatttgtgcttgtctctcgaagtgttgcctatgttaattgagaaaagtattaatgttccagatactttgcgatgttcagctcatggtgattgtactaatccatttgatgttttaacttgtaagaagtgtagagatctcagtggccttatgagttttttagaacatgaccagtagtcctgctaagaaaaaaccaagaaaatggtgggatgatgaagatgcttatagtgaggcttggtttgctgaatttaaggatattttaaatgatgtagtgtttgctgccacttcagaagatgaaggcttggtgtttgtgcttaaacttttacaacagtattataagcttgatttaactcatggtttggatgctctttctatgtctgatgctgtagactttttaaccaacaatgcattaggagtgagtagtgtcaataaaaagagtgataataccagtgtactaggtgaatatctacaaaaacaaattgaaaactataaaaataatccaaacaaatatacattacagttgtctcatggacctctccctgatttcagagagtctgaggcaaaacatgaatcctctaatgaacctagaggagatgacgcagtccttagtaaaaaggatttacacgaagggggtggatttagtgtgcaactacccttcagtcattacattggccctggtaatgagttacaggctggggccccggagagtgttgtggatgctgcagctaggagtcatgatttcaggtattctgaacttattaagttaggaattaacccttacacacagtggacagttgcagatgatgagttactccataacattaaaaatgaacatgggtttcaggctcaagttgttagagactattttaccttaaaaggtttattcacatctacagctcactttaagggagaacttccagctgttccacagtactcttcaagcgaaaactaccccagcatggcttctgttacagcaaccgaaggggcaaccggatcaggaggcggcggcagcaatgcggtacaagctgtgtggagagagggcgcaatattcactgattcttctgtaacttgtacctttagtagaatatttgtagtgccttatacagctgaacatgcttacagattttttctcctcctgctgaaaaattgtcactctgcagctacaggagaaagtaaagtgtgtgctgttagtccagtcatgggttacgctactccttggcactatatagatgtaaattgtgcctctttgtatttctctcctttagagtttcaaagactaatagaaaattatggctctataaaaccatcctctatgcaagttaccctctcagagatatgtattaaagatgttacagacaaaccaggcggaggggtccaggttacagacagtaccacgggaaggctatgctacctagtggatgatgagtaccagtttccttatgtaataggtcaaggacaagacactttagccccagaattaccaatatggacttatttgcttccacagtacgcgtaccttactgttggagaagtaaatactaagggtattacatctgctactcgtaaacagccttctgaagaatcagccttttatgtcttagaacatgctaattgtctcttattaggaacgggtagcagcattagttcctcttatcagtttccctcagtgcaagccgagtctctagaaggtgcctctcaacacttttatgaaatgtataatcctttatatccttccagactagctgtgccctcagctttaggaggacagcctaaagtgcgttttgttcaacccacagatcatgccatacaaccacaaaactttatgcctggtcccttagtaaataccattaccactgcagacggagattcttctaacactggagcagctaagcacttacaggcatttcttcaggggagctctcaaaacactcgcatatcctttaggcctggacctagatctcagccttaccattactatgatgaagtaaatcaaaagtatgttcatggcattgattctattagctatggaatgacaacctatggctttacacaaaaacctacagaaggttcacaagcagtaggaaggtatcctaatgacaaagaacaaaacaaacagctacagggcctgaacattaaaacctactttaacaacaaaggagaccaaaaatacactgaagaaattaacagacccctcatggtaggttccatatggaatagaagagcatttcattatgaaactcaactgtggacaaaacttcctaacttagatgaaggctttaaaacagaattctctgccttaggtggttgggctttgccaaaaccccctcctatgatatttttaaaaatgaatcctgcacctggtcccgaggggtttgctagtattacaagtagcactcttgctcagtatgccacaggaattttaacagtaactttaacctttgctctaggccctagaaaacacacgggaaggtggaacccccaacccgcatgtacacctccccacgctgcaggacacttaccctacgtattgtacgacccagaggttaccaaaaactcccagaaccacagacacgggtatgagaaaccagaggaatgctggagcgctaagaaacgagtccaccttctttaaacactatgtatgtcctttaggaaatcccccgccttcaatgtatggggctttatcacctcaagaaaaacatttaattcaatgctttcgcttgtgttctgcttaccctgatttgcatggcttgttaaaaaaataaaaaaaatacaaaaaaacatgtctgaacgtgttttcatttccccttgagaacgacaccaaatcaatagcgccgccgccgccgccgggaggcgggacatccggtctaaggcgggacttcctgtgacgtcacttcctgtaacgcaatatccggtgacgtcagctgtcaatcaaaaaaaaagatggcgcctgaacttggctcggtgccagccctagggttcgctgtaagcggggagctcaagggttgtcgcgaacttatatagaccgcgca

SEQ ID NO: 283 - DNA, 4880 bp, Rhinolophus pusillus bocaparvovirus 1
  source 1..4880: mol_type = genomic DNA; note = Rhinolophus pusillus bocaparvovirus 1 - NC_040623
ccaggggccagggagggggtttcatgatccggcttacacctatgtcatcaagctgccgatgattgatccggtgcgggcctgggagcgagacctgcaatggggactgtgtagggagcatcagcgggagctggacgagaccggcctctggctgcagagtccggagcaggagagcccgactcgtcagcggctctttttactggtgcacggcgaggacgctcactacgggcgtcagctggccctagcggggtacaatgcggcggtgaaggtgtttcagagcaagcaggcggtggtggagccgcagtgttcggtctacgctcagagcgagctgggcagcgacgggctgcacgtccacctggtgatggggggtccgggactgaacaagtacaacgcgaaggcggtgcggcgtcagctgcagctctacttctacacggagctgtgcgccaagatggagggcatctgtaaggagggggtcccggaagaccggcaggacgtgtatgctctgctgggtcgcctgcaggcggcgcgagaccgcaccgtctccgatgattattacagcctggtggatgtgatgacctatcggactcgggcgggcggggtgcacgtagcgagaatcagggctcaggagttcctagtcaactacctgctgtgtaagaacgcgcgcttccacacggaggcgccgacgactaggtgcactctggacgtggactggttcacggatacgggcaagacctatcagtccacgatcctgaacggggagtctataccgctggggatgaggagacagctctggctgaatctgcaggcgacgaacgtcgcgctgcacacggagccgtcgttcggaggggagctctttggtcagctgccgaaggtacagcaggcggggtggagggagacggagaaggcgggggggaatcagcgcatgactaagagggagagtttgatggttgactgcctcgaacgctgtcgtcaaggcgacatcttgacgtacgagcaattggtcgccaagcacagcgatatggtcgtcatgctggaagcgtctccgggaggcggacgcctcattgagcagatactccagatggtccacatccaaattaccaaagagtacacaccattaagctatttacagcatctgggtggagggcgtcgcctagcaccgggcaataaagcctggatactgatctcgttgcagggttacaatccctggcaactggggcactgggtgtgtacctggctgaatcggaccggaggtaaacagaacacgctgagcttcttcggtccggccagtacgggcaagaccaatctggctaaggcgatagtgggggcagtaaaactttatggctgcgtcaaccatcaaaacaagaattttatctttaacgattgcgcgcacaagctggtggtgtggtgggaggagtgcctgatgcatcaggactgggtggagcaggcgaaatgtatcatgggagggaccgagtttcgcatagataagaagcacaaggagagtcagctgctgccgcagactccggtgattgtcagcaccaacaacgacatctactcggtgaccggcgggaacatcgtgagccaggtgcacgccaagccgctcaaggagcgggtggtccaggtcaactttctgaagcggctgagctcgacctttggggagattgcgaccgaggagatctacggctggctcaacgagtgcgcggcgagattcgagccgacgctagagggcttcctcaagcagtggggtctcgagcggttgcctaacacgtttccgatctgcgtcctctgctctggttgttcgcaggactgggagctgcacgagaactgcggtccctgtcagacctgcggaggcgtgccggagctcgagacccaggaccgcggagcgccggagccaggtaagacctcgagggggtcgggagcggtgtgccttctcacctgacacgctcggggtcttgcaggcgtgaagcgggctcactcggaggagaacccctttgaggcgcaggcgccgaagcgtctgtgtgtgccggattccgacgaggaggacgagccgcagccaggtacctctcgcgatgtcttcatggggagcgggccgcagagaccgcagccggagccgagagcgccagagttcgggtcgccgcgacagggactcaacccgtcggagtggggcgagctcatgggcgtcgtcccgggggcatccctggaagaggagccgatcgtccttcgatgcttcgagacgctcgaagaatctgacgaggaagacgccgctggacgtcttctttgagcaccgggcgcagaatccggaggcgccggggctctgcggctttcaatggcacagcacgagactggcgcgagcggggaccgagcacatattcgagacggctcaaaaggactttcaatcgggggcggaggggggcaaatgtgattggaatgtagttagagaaatcatgtttagatttaagaaggagatggaccagaagtacaggaatatcatgtatcattttgccatgggggaggcgtgcgcgcggtgcaagtactgggacgatatgtacaaggcctactcggctcaggtcgaggttgatcaagttcctgtctctgctcctcctacagaggtcacggaccaggagatgctcgagctagccgagagcatggaggtggatggcgcccattaggcgcccgggtggttgggtcgtacctggctataagtatctgggaccgttcaacccgttggacaacgggaagccggtgaataaagccgacgaggcggcacagcgccacgatcaggcctatgataactacctggcaaacaatcaaaacccttacctgtatttcaataaagctgatcaagcattcttggaggatcttgagtctgaccggtcatttggtggttggattgggaagactgtctttggtcttaagcgggccatcgcaccggctctcggggagccggacgccaagcgacaaaagctcgagcgcgcccagaagcgcaagctctactttgctagatccaaccgggggtccaagcaggccaagatggaccagcagaattcctcggagggtgatcaggccaatcagcagactggctctgagacggctcgcgcgggaggcgcggcctcggccggaggaggcgggggtggaggagccggacggagtgtgggcatctccaccggaggatggcgagggggcaccctcttttctgactcggtcgtggtcactcgagtcactcgccagtggtactgtcccatctataacgggcaccgatacaagtccttggggtctcaggacgactcgggacaacgaaacaaatattggggcggcatgcggacgccctgggggtactttgattttaacaactactcggggcactttagtccgcaagactggcagaggctgaccaacgagtataagaaatggcggccgaaggccatgcacatcaagctctataacctgcagattaagcaggtggtcactctgggggcggacacgctctacaacaacgacctgacggccggggttcacgtattctgcgacggatcgcatcagtatccgtatccgcagacgccctggaacgagggggtcatacccgagctgccgaacgacgtctggaagctcccgcagtacgggtactaccagaggaacgactacctgcacagcatcgcggaagagcagtttgacgtggccacagcctcggcgctgggagcgcccttgttcatgctggagtcatccagccacgaggtcctgaggacgggcgaggagaccgagttccactttcaatttgagtgcgggtgggtgatgaacgaccgcgcctacgccaatccgcagtgcgactttaacgccgcggtggggacgaggcgctggtatcccatccacgatgagaccaataatcggtacactttccagaggtactcgccgtacaataagcccagcatcttcatgccgggaccgggcacgcgcaacacggggctggtcaacgagaccaataacccggacaagtcgcgggggccgttcgtgacgacctacctgccggccgagatcgccagcagcaccaacagcggactgggacaagacagcggcattccgaagccgtcggccaatcagagacagaaactggggtactcgacggcgccggccaacggggcctgcagcgccaccgatcggatcacgctggcctttgacgtggggccgcacaacaccgaagacacctcggtcaccacgaggggcgtggacacagacgccacgcgctggaacatggtgcacagcatgtcggggaaacaaatctccgatcatcagaccatctggatgtatcctaatcaacactggaacagcacgcccatctgtcggggcaacccgatctgggccaagatgtccaacaccaacaggcacaccatggaggactccagcgacgggaccctagtgatggcgcatccgccgggaaccatttttgtcaagacccaaaaaattcccattccgacgacggccaatacagatacctacctgaatctctacgtcaccggtcaggtgacctgtgaaattgagtgggaggtcgagaggtaccagaccaaaaattggagaccggagctccgcaatgtgcccattaaacaggacagcaccgcctacaacttcaatcaaaacggcgagtacaacatgccgacgacctactacgcgcacatgccgacgcgcatgggcatgaactctgtcctctaatctcaataaaccgagaatgcgtaaacctatcacgtgtccgactcttcttgaggggcggggatctcccgggataaaacatcgatcgctcagactaaaccgtatgactataatctcattcaacctccttcatgtatacgtcacactcatcgaagatgagtgggaggagtcttagttcactccgccgc

SEQ ID NO: 284 - DNA, 4726 bp, Rhinolophus pusillus bocaparvovirus 2
  source 1..4726: mol_type = genomic DNA; note = Rhinolophus pusillus bocaparvovirus 2 - NC_040694
atggggaggacagcttctacggacgcatgctggctcgagccgggcacaacgcggggatccgctggttccagttcaagcaggcggcgcgagacacagcttgttccgtctatagtcaggctgagcttagcggcacagaggctcacgtccatctggtgataggaggaccggggctcaacaagtacaacgccaagggggctaagcgctcgctgcagatgaagtttttgagcgaggtggtggtgatgctggaagcgacgtgccgcgggctggtgccagaagatagacagggtgtagtggggctgctagggctatttagaggggcgctcgaccggacagtggcgagcgaagactacagcctggtggacgtgctcgagtaccgtacgcgggctgggcagtgtcatgtcgcgcgggtgaacgggctagagtttatcaccaactacttgctgtgtaagaactggcagccatttgtggaggccgatccgactcgcgcgacgatggcgatagacttttttagtgggataaacaagacatacatggccactctgattaacggggagccgattccgctgggcaagcgcaagctgctctggcaggagctgaataacaacgcggtgacgctggctacggagcctagcttcagcggagagccgtttgcgactttgccagcggtaagagcggccgagtggcagggggtggatcgggcagggggtcctacgcgcatgaacaagcgcgagagtttgatgctagactgcctgcaacgctgcaaagaagggaacctgctcacctatgagcagttggttaacacacacccggaactagcggtgatgattgaggcgttgccggggggtgcgcgcttggtagaacaggtactccacatgatgcatattcaaatagtgaaagcgcacacaccctggagctatttgcgtcacctagatggaagtagtcggtgggaaccgggcaataaagcggcagttttattacacctacaaggttacaatccttggcaggtggggcactgggtggtgacacttttcaaccgacaggcgggaaagcagaactcgctgatgatttatggtccagcgagtacaggaaaaaccaacttgatcaaggctattgggggtgcggtgaggctacatgggtgtgtgaaccaccaaatctacaactttatctttaacgactgcgctcataaacttgtcgtctggtgggaggagtgcttgatgcatagtgactggctggaacaggccaagtgtatattaggcggcaccgagtttagaatagacaggaagcacaaagagagccagctgctgccgcagacgccggtcttgatcagcaccaacaacgacatctactcggtggtgggcggcaatactgtaagtcaagtgcacgcaaaaccgctcaaggagcgtattgtgcagctcaattttatgaagagattggcttccacctttggggagatttctgaacaggaggtgtacggctggctcaacagctgcgcggcgcgtttcgagccgacgctggacgggtttctgcgtgagtggaacttggaacgtgtacccaacacgtttcccattcaagaatcttgttgtccacaggactatacgctgcacgagaacgcggtagtctgctcgcagtgcggaggcattccggagctcgagactcgggatcgcggtcagcctgagccaggtaaggcattggcgccggttggtcggtggagcgggaaccgtctcggatctcccagttcactgggcctttgccttacagccgttgaggagccagactcggcggcagaggagccagagtgcaagcgccctcgtctggtggatccagagcctgcagaggaagagcctcagccgggaccatcaggtattcagcatgagcggcagccggcagcactgcatgtttcagaagtggaggaaggagaagagattgagccctctcactttgaggggatcacgccggagcaatggggagagctcctcggcatcatccgggccgatggcttcgacgagcagccacgcacgctctactgcttcgagtcactggagccgtccgacggcgagggagacgccgattgacttctttatgagaaggcgctcggagacgccggatgctccgagcttttgtggcttttactggcactcgactcgattgactcgggcggggactgattttatctttaacatgtgccaggagaaatttcaggctcgcgcggtggggggcaaaattaactgggatgattgtaaagagattctgtttgatttgaaacgctgtatggatgagaaataccgtaaaatgatgtggcactacagccagggggggatatgttctagctgtctgtactgggatgagcaatatcgtaatcgggatcaacctgctcctgttccagaggtgactgatgtggagatgctagaggcggcccaggaggtggaggcgatggaagtggatggcgccaatcaataggcgtcctggtggctgggtagtgcctggttacaaatatctggggccatttaatcaattggatgcgggtgagccagtcaataaatctgatcaagcggctcaaaaacacgattttgcttacgatcaatacattaaatcagggaaaaacccttacttgtatttcaataaagctgatcaagacttcattgaagaccttgagtctgaccgttcttttggtggctggattggcaagactgtgtttggcattaaacgagcgattgcgccatctcttggtgagcctgacgaaaagagagctcgcttggagcgtgcccaaaagcgcaagctctactttgccaggtccaatcgcgactacagcaaaaaatccaaaatgtcatcggctgacgctgcagataccaataatgaggcgggcgaaggcacgtcttcggatgctagccgcgcaggcgcccaaaatcaaggcggaggtgggggaggtgcaggtggacggggtgtgggcgtctccacaggaggctggaagggcggtaccatcttttctgattcggtcgtggtcactcgaatcactcgacaatggtacgctcctatctatgatggacatcgatacaagtcctttggagccaaacaggaaaacactaatgccaactcctactggatgggcattgtcacgccgtggggctactttgactttaactgctacgctggacacttttcgccacaggactggcagcgtttaaccaatgaatacaaaaaatggagacctaaagccatgcgagtcaagctttacaatctccaaattaaacaagtggtcaccttgggagctgacaccttgtacaacaatgacttgactgctggcgtgcacattttttgtgacggatcacatcagtatccttatccacaaaatccttggaacgagggagtgattccagagctgcctaacgacgtatggaaactaccacaatatggctactaccagcgtgactggctagttacacaaaacataccatcacaaggagatgatgttgcagctaaagaatgccgcgtaaatgcgccgctttttatgctagaaaactctagccacgaagtgctgcgcactggcgaagaaacagagtttaactttgaatttaactgtggctgggtcatgaatgaccgagcatatgctccaccacagcaagactataatgcaaaaattggaacacgcagatggtacggtgtatatgatagctctaacagccggtataactacccatgtactctgcgttactaccactgcttcatcttcatgccgggaccgggaaccaggaacaccgggaaaattcaaactgccaacgatccagtcaagagccggggaccgtttatgacggtgcacctaccggccagcatgccaatcaacacgggcaacagcctctctcacaccaacaacgtcgccaagccgtctgacgcgcagcgggaaaagctgtcctatcagacagcgccagctaatggcgcctgcaacgcgacagaccggatcgggctggcctttgacatggggccgcacaacggaaccgacaacgaggtcaccacgaggggcgtggacaatgactgctcaagatggaatagcgtctactcggccacgggcaacaccatctcggaacacaacacggtgtggatgaacccaaatcaattttggaacagcacgccaatctgccggggaaacctgatttgggccaaagcgccaagaaccaataggcgcacaatggaggactcgagcgacgggacgctcgtgatggatcacccgccggggaccatttttgtcaaaacccaaaaaattccaattccaacggcggccaatagcgacacctacctcaatctctatgtcacaggacaaatcacctgtgaaattgaatgggaggtcgagaggtaccagaccaaaaactggagaccggagctcaggaacgtgccgtacagcaacgacccttcggcctacaactttgacggcaacggggactacaacatgccgacgtcctactacgcgcatatgcctactagactcggcctcaacactgtactttaatctgtcaataaagctttcgctctcaaccggtggtcacgtgtcttttgtccgactacaaattgggactacaaggggaggggcaacacaagctagacctttgactataatcttctacaacctccttcatgtaatcgtcatcacatcgatagatgtgatggcgattacatgaaggaggttgtagaagattatagtcaaaggtctagcttgtgttgcccctccccttgtagt

SEQ ID NO: 285 - DNA, 5414 bp, Rhinolophus sinicus bocaparvovirus
  source 1..5414: mol_type = genomic DNA; note = Rhinolophus sinicus bocaparvovirus - NC_031695
acgtatacatgaaggagatactgtaaagataatatcaacgtgtataacttgcgacggttatgcctgccgccatgacagttctggcgccatgtttgaaatacgttgaccaatcagattcatccacgaatcgaaaataggtggagcttctgcctatatataccggcgattcaggaagcgactctcattctgctctgagctctcgccggtgcaggtaagcctgagatggccgctgtgcttgaatctgctgatttgtctgttctcgctagctatgttcagggcttccactctccggcttacacctatgtgttcaagctgccgtttttgggctctgttcagagctgggagcgcgatctgcagtggggactgtgctctcataaccgagaagggctggatgacgttagcggttggctgctggctcctgagcaggatagcccgtcggcgcagcgcctgtacctgcaggctcacggcgaggaccgctactacgggcgttcgctggctatgtttgtctacaatgttgcaatccgctattttcgatctcgccaggccgtgagcgagcctagctgctccatctacgtgcagtctgaaattggggaggctcagtttaatatccatctggtaatgggtggtcctgggctgaacaagtacaacgccaaggcggcggtacgcccgctgcagctgcactttttgaccgagctgggcgatcagcttcagtgtaatacccgggactgggtgcctcaagaccgcatcgatgtgcatctgctggtttctagagtgcaagcggcgctgactcgcaccatcaccgaggaagactatcgggtggtggacattctcacgtatcgcacccgcgctgggcaatctcacgcggctagagtgaacgggtgggagtacatagtcaactatctgctgtgcaagaacgcgcagttttttgcggaggcgtcgccgcgccgcaacactttggcttgcgattggttcgagggaatctacaaaacctatcagtctactctgatcaacggggagtctgtgccgctggggtcgaggaagaggctgtggaaccagctgcaggcgggtctgggggtgctgaaagcggagcctgtcttttctggcgagatgtttggggcgctgcctgaggtgagaccggccgggtggaaggaacctgaaaaggcggggggccgtcagcggttaaaccggcgggaagcgctgatgctggactgtttggcgcgctgccgtcaggacaacctcttaacctacgagcagttggtgggcgggcatcctgacctggtggttatgctggaggcgattggtggaggcggaaagcttatcgagcaaatctttactatgttccatatcgagttagtcaaaaagcacacgcccttgtcttatttgcaaacgctgaatcaccagtccagagtccaaccgggcaacaaggtctttattcttctcggtctccaaggttacaacccttggatggtgggtcactgggtgttggctctgtttaaccggcgggcggggaaacaaaatactctgctgctctatgggccggccagtacgggcaagactaatctggctaaggctttagtgagcgccgtgcggctctacggctgcgtcaatcaccaaaacaaatcgtttatctttaacgactgcgctcacaagctggtggtctggtgggaggaatgcctgatgcacgctgactgggtggaacaggccaagtgtattctgggtgggaccgaattccgaattgatcgcaagcacaaagagtcgcagctgctgccgcagactccggttatcattagttccaataacgacatttaccgggtggtgggtggcaacaccgttagcgaggttcactctaagccgctgagggagcgcgtggtgcagctcaactttatgaagagactgcattccacttttggcgagattactctcacggaaatctacgcctggatcaatagctgcgccgatcgctttgatccttcgctcgaggggtttctcaagcagtggaagctagaccgggtcaagaatacctttcctctgaatacgccttgttccggttgttcacagaactttgaagtgcaccaaaacaccggattttgcctagtctgtggcggcgtgccggagttggagacccgggatcgcggtcaacccgagtccgtcggtgagtctggcgttccgggggcggctctcatgttatgtctccgcgtctctaacgttgtgtctctacagctacgcagtgcgacctcgacgcggagcccgaggagccgccggccaagcggttgtgcgtgaacgaggacgtggaggaggatcctctgccaggtccgcaagacgatgtcttcttgggggtccaggaagaggagccggagcccgaaccgtcacgacgggcgctcaacccgtcagagtggggcgagctcctgggcgtctaccaaggggacacgctgggcgaggaaccgatcgtcttgcactgcttcgagtcgctcgaggactctgacgcagaaggagacgccgcttgatgtgtttatgcgttaccggtccgagcatccggatgcgccggctctgtgcgggttttactggcactccacgcgtctgacgcgcgcggggaccgacttgattttcaataaattgcagggtgattttcaggcgcaagccacggggggaatgattaactgggaccaatgtaaagaattgctgttttcaataaagaaggacctcgaccagaggtaccgcaacatgttatggcactttagccaggggggcgcctgcgagcgctgtcaatactgggataatgtgtaccaagcgcaccaagcgaaggtgcagcttgagcgggaactcaatgttgtttcagaactgacggaccaggaaatgctggaggccgtcgaggacatggaggtggatggcgccaattagacgcccgggtggcagggtcgtgccgggatacaaatacctgggtccattctatcctctcgataacggggaacccgtcaataaagccgatcgagcggcccaaaaacacgatcaagcctataatcaatatctgtctgagggtaaaaacccttatctgtatttcaataaagctgatcaagactttctcgaggatctcgagtctgaccgttcttttggtggttggatcggtaagactgtgtttggatctaagcgagctattgcgccatcgctcggcgagccgagcgccaagcgagccaaactcgaccgcgcgcagaagcgcaagatctatttcgccagatccaatcaaaaagccaagcaacccaaaatggccgacacggccaataaccaagaaaatcctgaagggggcgaagcggcgcctgctggctctcgatctggccaggccgctaacgcgggcggtggtggaggtggagccggacggagcgtgggcatttccaccggagggtggcgcggaggcacgctcttttccgacacgacggtggtcactcgggtaacgcgccaatggtactgtcccatctacaacggccatctctataaggcctttggcgcgcaagatgacgccgacagtcaaaagtcctactggcagggcatcagtacgccctggggctactttgactttaactgctacgcgggccatttcagcccgcaagactggcaacgcctcactaacgaataccgcaaatggcggcctaaagccatgcacattaaaatctacaatttgcaaatcaaacaagtggtcacactgggcgcggacacgctctacaacaacgacctgacggccggggtccacattttctgcgacgggtcgcatcagtatccgtatccgcagaatccttggaacgaacacgtcattccggaactgccgaacgacgtctggaaactgccgcagtacggctactaccaatacgacaaatggctcacgtcggatcaacccaacgacaacaacggagtatccaaagctctccgcgtgatggcgccattgtttatgctggaaagttccagtcacgaggtgctacgcaccggggaggagaccgagttcaactttgagtttgactcggcctgggtcatgaacgaccgggcctacgcgtcgccgcaaaccgactataacgccatcgtcggcacgcgacgctggtatccgactcacaacgccaacacgggctcctttacctacaatcgctataatccttacaaaaaacccagcaactggatgccgggaccgggcacgcgcaacctcgggctcaaccagaccacttcagattcttccaattctcgaggatcctttatgacggcaactatgccgaccagctattccattacatccggcaacaacagtctctctcacgatcaaaacattccaaaacccagcaacgattttcgacagcgagtaacgtctcaaactcagccggccaacggagcctgctcggccgtcgacggaccgacgctcacctttgacgtgggaccgcacaacgacacggacggcaccgtcacgtccaggaccatcgataacgacatgacgcgatggaacaccgtctactcggccaacaacaacaccatcaccgagcagccgatcgtctggatgtacccgaatcaggcatggaacagcacgcccatctgccggggtaatcctatctggagtaaagcgcctcgcaccgatcggcacacgctctacgacagcagcgacgggtcgctcgtcatggagcatccgccgggtaccatctttgtcaaaactcaaaaaattcctattccaactacggccaattcagacacctatctcaacctctacgtgacggggcaagttacctgcgaaatcgtctgggaggtcgagaggtaccacaccaaaaactggcgtccggagattcgcaacacaccctcatcggacgagccgacggcctacgattttgatcacaccggggcctacaatatgccgaccaaatattacctacacatgccgacgcgcatgggcatcaattctgttctgtgattggttgcctttaataaaccgcttgattcgtgtcagtaaaaccggctctgattggttcttttcacgggactacaaatggactacaagtgggaggagctatagactatgtacgttgatataatctttacagtatctccttcatgtatacgtcacaagggagtatcacttgagggagtgtccgtagatcaatattctaatggtatctttacagtacttccttcatgtagacgtcacagccgcgcctcggtcgtatagcccggagcggctgcgccgctcgcgcgctgcgcgcgcgcgctgtatctctctcggcgcggctgtgacgtctacatgaaggaagtactgtaaagataccattagaatattgaactaaggacacttccttcatgtagacgtcacagccgcgccgagagagatacagcgcgcgcgcgcagcgcgcgagcggcgcagccgctccgggctatacgaccgaggcgcggttgtg

SEQ ID NO: 286 - DNA, 6296 bp, Roe deer copiparvovirus
  source 1..6296: mol_type = genomic DNA; note = Roe deer copiparvovirus / Copiparvovirus ungulate 3 - NC_055518
cccggacacggaactacgtcaccggatctggaaacacgtcaccggaaccggatttacgtcaggaacacgcgaggatagagaatatatactcgtcttataatagggttttgtcgagcagtagacctcatcgacgctttgcgtcgatgacgtcgttcgctcgacaaaaccctattataagacgagtatatattctctatcctcgcgtgttcctgacgtaaatccggttccggtgacgtgtttccagatccggtgacgtagttccgtgtccgggttaaagggagtccttccgccgggacggagggtgcgtgcgtctgacgtttgttgcacacgacagcaagagggtggttactttttcttaattttgtggttatattcaagaattccttttttggtcgggtggatcgcttaattagcaatgaatattcatctaaatggtgattggtgtgacccgattccgtccggggtggagctaagggtatataaactcgtgtacttcctggatttttcagttggagttctgctttctttcagcgcagaccctcgttcgggcaagtacatgatttattcttttatttcaattaataaaactcctttttctttaaatacagcaatattaataattgttttaattttaattgttatttgtactgcattcttatacttattaggatggctctgtattatacagcgactatcacgttaccagatgatggcaaggcgtatggacctgcccatcataataatgtgatgtgcactattattaaacatagaaataatgaacaatggacctatttacatgatcctgctgaatatgcatatcatatgtgcttggggcagatttatgtaaatatgcttgaatctcagcttgagcaggcgcactttgccggtgctaactatgaatactttgttcagctagaaaagggtcctcagaagaaaagatggcatttacatatcgtggttgatatcagtattggacagcctcgtaaagctagagagctgcttgaaactgttgagcgaatgtattccaacttagcctttggccgtactattcgcactcttgatattaacaaggagagaaatggcagttggaagatagaaaatgaggactttatcattaactatctctgtaaaaaaataccagtaaagggctgcacattcgcgtggaccaatattgaacgcgaacctattaaaagtatgtgcggcaatattgaagctagactacagcagcatgaaaacatagatgaaaatattcctatgtttaaacaagcctctggagaaaaactagccaaattggttgaatttatgattaaaaataagatcacagatgaacaaagatatttgcagaagtatgaagcttccttctttagcttttatgcaaccgttgccgggcaaaccatgttccgcaatgctttgcaaattgcaaaatctcgcattgcttcagacataccgctgggtgtgtggcttgcaggctttacttctctaaatgagctgattgacaaacaagtaggagtgaaatctatggaattgggaaatagtaaaattaatgaaattatggtgcaaaacagctataacccaatcgcagctgcttatgtcattgctgcttggtcaatgggcatgactggacgcagaagagcgctatggctgtatggagatcctcaaacaggcaaaagcattatagctcgtgctattgcaactggtgctgctagctttggatgtgtaaattggaccaatgaaaactttcccttccaagatataattggcacttgtgttgcttggtgggaagaaggcagaattacagagcctattgttgaagtcactaaagccctaatggctggaggtaccatcagagtagatcgtaaatgcagagattctgtagaatgtaaacctcctccatttattattaccagcaaccaggatatgactttagtctattctggcaatactatcagttttgaacaccagggtgcgctgcaggatcgcatgatccaatttaaatttactaaaagactccctccagattttggagaaattactcaggatgaaattaatgcctattttaaatgggcaatgtatatctataccaacaaactccttccatcagaatataagcattggactaatcccactagcattggctttatgatccaaaaacaatcaggtgtagttcatcataccctcgtagaaagaattgaccatccttttgaagaagaagaacgagaagctcttgccgaactcgattccatgtttgaaaatgactcagacaaagaaaatcaagaccccgagatggaactgccccctcgcaaaaagaaaaaagctctgccggtaaggaagagcgcatcattactcagtgtattatttatttatttaaataatatactaatgataccctctttcttagctcccagaaagtccaatatcggacggcgctgaggaggttgactcaactccaacagcagggccttctggtcttgcatctattagcagcatcgatccacaaccacactcatctggaagtggaattacccgctcggataacattatagaggacggaatcattgaaggagatatccaagaagagctcatcaatccagattacaacaacaaaaaccagctaaaagaacaccacatttgctacaatcaagagtgcagagattacccagagtgccccgggtggaagtaagtactttaaaatttatatttacacacatctatacatacacatccctgatatacatttctttcttaggtcgttgctgtgtgacgaactcaccgagctgacagaggaggaagtacttgccttctttgacagcgatcaggttgcagaacaatgacagatagagcccgtggagaaggagggagcagcatagctttgcatttaggagaaacatttaaactgcttatagatcataaatataatactcatcctgatactgaagcatactatacagattctagtggtgccaaatatgaaaaacgtagatatatatttgtgggcgcagatcaagatacagaacaagcctgggctgatcagcaagcatataataaactacctggacaaaaaattaagggcccacacggaaaatgggccggttggacttttcccaatcctcctgatgatgtggtatggcccgaatcatcattggaccccactagatctcagcctgatccacgtccaactcccactagtccacctacacaacagtttaattggactggcggaggatggccaactaacacagaattaccctcttctaatgttcctcagatgggtattgggtcacagggcaatgtacaatttagcccaatgacagcagacgaaaccacgattgaacgtgctaaaaatgaagggcaccccattccaccaatcacagaaagcccagaaatagcacatgacctagaaacccttgaacatgaaaccgaggaatcagaattcaatatgcagcttattaaacaagctatagcagagacacatgatagcgaagatatagaaactagagctaaagatggagaaggagctgatcaaacttccctcacggtacatggcagatatgtcggaccaggaaacccgcttccggcaggcaaacccagctccaagttggatgaaattgctcttcgccatgatatcaggtaccatgttgaattaaaacataagcattggccatatttaacttatcaatatgccgataaaataatgattgatgaaatcaatcaaaatatggaacaaattaaacaagaaggtaatgaatggctagccaactttatcaaaagtctttggactacacaaaaattatattcagctcctatcggagttttattagaaaatataattccagaaatgggctggtattctggcgacacagcaaataaaatttataatttcaatcaatttcagcatgcactgacgcggcacggcaagactacctggacgggcctgaacgatccaatacatctgccattccgtcccgatcgcacacatccatcagagacagattctccttcaaacgcagacgcagaccaagcagccaaaaagaaaccgcccaaatcagcacctccctcctcacactctcccactaataaaaacttatcttcaacagatatgtctacatgtgatgcaaatactgcgcctacagtggacactatttgtaccaatgatggcctcccaattggtatctctaacaattcaacttcaactgcatcccccggaggcacagaatcacagggagggggaggaggggccgccaaatgtccagaaaagtggtttggaggtgtcacttgggagggtaataccttcactacttataacactcgccgctgcatgcttactccatttaatactaaatatctggctagatcaggtgtcgacaatacgcccagtgtagatattgaaactccttggtattactttgacctaaatgctttcagttgtcacatcaacccacacaccatgcaagagattgttgaacatacagatggcatacgtccactttcactcactatcaccattgcagaaatacaagctaaagacgttagcatgggatcaggcagtactagctccacatatactatcacagaatcacaaacagctaccatgctcttacacagagacagcgattatgatcttccatatccaatagggggcggtcaagatactataccagaccatcttccaggagactggtattccctcccacgatactgctataaaactctcggtggcatatcagctgaacccaaagaacaccgtatcacaaatacctcaacattttgcaatggcacacgcataacaaaccaaacatggactgagcgacatcactcagttcaagactctgagctctttcttattgaaggaatgccatgcacacaactccaccccaactgcagctggagctatcaatactcattcccacacgtctcttgggccctaactacacaatattgttggaacacccgcagacaagacaacccatgtcaacaacttagattttataatatcaaaaatacacattatgaagataccaaacaagacatagatgtagttatgtgtaccagctcaagcgacactacatgctcaaacgagtgtggtaccagcgggagcaacaacaaaattaaacgcaaacgcatcacagtagaaacaaaaggcaacgtagaccaccataacagaattcaactccaaaacaataatgtaaaaatactcagagccagtaacacacgcccagctatgtggcttccagccccacgccatcccaccggagattgtgtttttattaacccagccaacgccttaggcatcgcagacaacaaaatagactcacattatgcattcagcaaccaaaaaaaacatattatactaatagaagaagaattatacagcaatggtactactcactccaaaacatgcttaccaggacctgtcactcaagaaagtgctatacgcacgccagagggcgccatcctcataaataccaacgccctcgcagtagccagaaacaatgcagaccaaacaacacacccagcaatatacaccaatggcgaatgcttaccgccaaacaaaacattccaactcgtcatcaatacacgacgaggagcagacggtccatcaaacagcacacatatcaaaaattccaccacagacaccactaatttcggcattgaacaatgctatggtatgatgccaggacaagtagcagaaaaacaatcaggattttatgaaaaccaaatatggtgtagaaaccctaatacagacatggcagacggaggtggaaatccacttatcgcccaatggggtattaaaagcccaccacacctaattcttgtacgcatgctacccactccagctaactcaactacagatatgggcaaatacaaatctcccattatgggatcaatacttaatcaatatatgacattccaaattcaatatgcaatgaaatgggaatacctacccaaatccagaaataaatgctggaaccccatcacgcctccacaactaccacagccaagcaacggacacaacgtcatctacaacctcgacaccagacgccaaggaaaccaatactgcatcccagatgaaacttgggcattcaagcaacgaatccgcaatcgccgctagcctatgtaaccacaaaaataaaaattgtaatcccaaacttctgcgtgtatttctgacgtagtcagatcaaatcagatctaatcagatcagattagatagggcacacgtgcacgtgtgccctatctaatctgatctgattagatctgatttgatctgactacgtcagaaatacacgcagaagtttggg

SEQ ID NO: 287 - DNA, 5038 bp, Rousettus leschenaultii bocaparvovirus 1
  source 1..5038: mol_type = genomic DNA; note = Rousettus leschenaultii bocaparvovirus 1 / Bocaparvovirus chiropteran 5 - NC_040695
atgggggacaacatggtgtgataaagatgataacaatatgcttgttcatctgtttgctgtactttgcactttgaccatgctttatgttggcgggctctctgtctatataagggacgctgtatcctgtttgtctcattcgtcttccggcttatggacagcgcggatctctcctacgactctgactccgactccagcaccgggtgagtgatggctgactctaacctggtcgtgttcgctcgcgattctgactttctgagcttcaaggagcctgcttacacctatgtgctaaactttccatggaaagactggtcatctatcgaggagactctccagatggcattctgtccatcgtttgccaacattatcagtctggaggactgggcaaatctggccatcgctgatgattatgaccgggtggtccgcattcttaatgagcgcggttatgtccagcactatggggctgtgctagctaggagtcttcaccgcggtctggtaaaggagtttcaggccaggcagggcaagccagtgcctgatctggacacttatgttcaggttgagatgggggcacaaaacctgcatgctcatatacttgttggcggccttggtctgaccagatataatgctaaagctctcaagaccaatatagggatcagagcaactgaggccatcatcactcatctcaagtctactctgggcctgcactatgacagtgttgagtttcaatgtgtgactgttccgattgagttgcttcgccatcagctacgctctggcacttctgatgctgtcactatcctgcaatacaaagctagaaatggagaaatgcatgcctgtcgcgtcaatcctcgcgaatacatcagcaactacctgatgcctaaaaatctgaaattcaattctcgcgtgaatcctgctaagcttactcctgagcctaactttttcgccatgactgagaagacctatgctttcacgctgatgaatggcaagattgtgtcttgctttgatcgccgaaccatctgggagaagctccgtcagtctacagacaagtcgctggaaccagtctttgggggagatccctttggagcgcttcctcaggtaatgcctgctaactggaatgcgctcgctaagccgggtggccggatgactaagaaggaggggctgatgctggactgccttaagcagtgcctggataatcatttactcacaccagagcaattgatggactttaacccatcactggtggtgatgatggagtctcagagtgggggcagtaaactccttgagcaaacattaaacatggctcatgtgaagctctgccagtcatataccactctggagtacatcctgaagcgatatccagtgcgtccaatcagctcttccaacaaggtctttcagctctgcaacacacaaggctacaatccgtggcagctgggccattggatctgcactttatttgccagaaaggctaacaagcaaaacactgtctgcttctatgggccagccagtactgggaagaccaatctagccaagggcatagctgaggtggtcaagctctatgggtgtgtgaaccatcaaaacaagaactttattttcaatgattgcactcacaagctgttggtttggtgggaagaggctctcatgcactctgactgggtggaacaggccaagtgtctgcttggcggcactacctttaggatagaccgcaagcatcgcgattcttgtgccatgggacagacaccggtcatcatttcaaccaataatgacctgtacaccactgtgggtggcaatgcatctatccaggtgcactctaagccgctcaaggaccgcattgtccagctcaatttcatgaagtcgcttccaagtacctttggagagataccatcggatgatgtcgctgactggatcacaaattgtgccagtcgcttcacttgcactctggaaggatttttgagtcagtgggggcttcgccatgtattgaatgcatttcctctaaatacatactgcgactctcattcacaggactttgtgctggaggattgtggaatctgcgacacctgcggtggttacattcctctgcagacttacagcgactctactggagcgtcttcaccaggtaacttgtctcctttactgaatgatgtcctggacatggaagctgagtacgtctctaactttgatctttctctgttagcaacaccagagaaggaagaaaaggaaccagcgacgccgcgtaaacgacgacgtcgactacagtctgatccagccgacggtgaacaaccttcgacttctaagcagctccgagcggcaccaatcagacgagtaggtttctctgatccaccagtcaccctcaactactacgatgagtgggagagcatgccaatcacagacacggagtgggagatctacctcaggcaaagagacccggcgccgatcgaggagccgaagcaggagtcctctaaaggacccacaccatcgcagtggggagagctcctcggggtcacatcgcactccatggaagaggagccaacagtgctacactgcttcgagaccatcgactacgatgagctcgaagaagaaaaagaccacaccatttgaggtctttgctcagcacaagtctctggttggagacactcctggctactgcggcttctactggcacagcacgcgcatcgctaaaaaggggactgattatatctttgatgttgcccagaaacaattccaatcagctcagtctcataatcagattgactggaaagcctgtagaaatattctgtttgattttaagaaaaccattgatcagcaatatagaaacatgttctggcattttagaaatgggggtgaatgtgaaaaatgtgtatattgggatgatgtgtatcgcatgcatttagctaatgtggattctacttctgtatcccagccagaagtaactgacgaggaaatgcttgaagcagccatggctgtagatggctcctgttaatcgcaaaccagctggttgggtggtgcctggttataaatatttgggtccatttaacgatcttgataaaggtgaacctgtaaacgctgctgacagagcggcccaagtccacgatcacgcctataataaatatttgcagtctggcaaaaacccttatctgcatttcaataaagctgaccagcagtttttagacgaccttgagtctgatcgttcttttgggggctggatcgggaagacggtgtttggcattaagcgggccatcgcgccatcgctgaatgaaccatcgcccaaaaagtccaaaacagaagcagcactcaaacgaaagctctattttgcacggagtgcaaaagccagtaagcaagccaaaatggagccagcagcagattcaacaaacaatcagcagaatcagccaaaccagccggcgccagccaacactggcagcagcgccggtcaaaccaatgccggaggaggaagtggaggacatggagtgggagtcagtacgggaggatgggaaggtggtacttggtttggggatgacaccattgttactactgtcaccagacagtggtacactggaatacttaatggacacaagtactcactcttgaagcaaaacattgcttctggtgttccaaatatctggacggggatccagacaccatgggcctactttaacttcaactgctatcattctcactttagcccaggggactggcagcgcctcatcaatgagtacaagagttggagaccaaagagaatgcatgtaaaaatctacaacctgcagattaagcaggtggtgattctgggaacagacactctgtacaacaatgacctgactgccggggtgcacatcatgtgcgacgggtctcaccagtatccttatgcacagcatccatgggatgagctgacattacctgaactaccttacaatgtctggcagctgcctcagtatgcctactttcagcgccagggggatctggtggacgacaccaatcatgctgatttgggcaacattgaaaacataatcagagtaggagctccgctgtttatgctggagaacagcaaccatcaggtactgcggacaggagaagcaacagaggtcaacttctccttcgactgcgggtgggtacacaatgacagggcttactgcgcaccgcagcaggactttaatccaatggtcgctagcaggcgctactatgccagctggagcaatgcaaacaacaaatacatgtttgataggtacagtccatataaaaaacccagcaactggatgcccgggccaagtatacacctacacggggcgacacagacggccaactttcctcaggacgcacgaggacctgtcatcaccgtgtttgctccgaggggaaccgtgggaaggggaggggcatctagcacagtgccggggacaaccggggactacctggccagcgcggagggcatactgcaagcgggattcagcacgtcgcctgtcaacggagcctgctctagatcacactacccttcgctggcgtgcgatgccacagagggggcaaacaatgagacattcttgtccgcacgcaacatacacattgacgtgactagatacaatgcagtctacggggcaaacaggacagcgacagacaacacctatcacaaatacaatgaggtgtggatgtttccgaaccaagcatggaacagcactccaatttgcagggacaaccctatctgggacaagctgcctagaacagacaaacacactctgctagatagctcatatggcacgcttcccatggcacatccgccaggcacaatctatgtaaaagtagcaaaaattcctattccgggggctgcaggggcagactcatacttaaacctgtatgtgactgggcaggtgacatgtgaaatcgaatgggaagtggagaggtaccagacaaagaactggcggccggaagtaagacagtctgcatcttcctttgtaaacaaagatttgtacaatgtgagcgagacgggcgtgtacagcagggccaacaccttcaacgaatgcatgccaacaaagtgcggcatcaatcgtgtgctgtaaaattcaat

SEQ ID NO: 288 - DNA, 4913 bp, Seal parvovirus
  source 1..4913: mol_type = genomic DNA; note = Seal parvovirus / Erythroparvovirus pinniped 1 - NC_055458
ctgccccccaacccctccctgggtgtggcttcaagatggcgtctttggagcggtgccattgcctgccctgctaattgagtaaccaaggcctggtttctgatgtgaaggcgccattttttgaaagtcgcacatcgagataattggttgacttgatcacaccactgggtgtgtccgtacaggattggttcccgcctatttttaaataatgccaagagccctaattggttgctgacagctataaattgcagctgtatgtgctgctctctcactcctttcgaccggacggacgtggacggagactttcactgacaggtagctatgactgactacgggtatcagagcgagaacagggtggtgtggcgcggggtggttcacctgagagagcgggttgagcgtatactctcccctgagggctggcccctctgcgtgactgcaagggatgcaatcaaaccgagcagcgcgtacccgggggactgggttgagccaacccacgacaatcaggcgaccatcatgtttgcgcagcacctctttgaattcttagttgggggtgttgtggagagatgcatgggagcctatgatgtttttgcgcagctagagcactcttctggatattttcatatccatgtgtgtcttctgctgggtggggagtaccaggctagaatggcttgtgcggtgttccgccgagcatggttccgaactctgtgcctcttgacagaagagcctgtagagagaaggctagagtggctatctttgagcaggaataagcacggacgggctgagaggggcgacaagacatttctctggcactatctccttccaaagctgtcttctaagggccaagtgacttgggcctggtccactacttgctggctttctaaatattgcgtctctgactctgagagggaggctctactggctgaccgcggaccgggtgagggtggcctagagggggctgatgtcccagtatatagatccgctaactgtgaaaaaacattagccctggctaagattttaagggagagggggattgttacaggggatcagttgagagatcagtacccatcaacatgggcaagctatgcttgtgtgactgcgggggagaaggtcttaaacgcagcgctggccatgaacttggctctaacaaaaggagagaatgaggggttgatagatttaatatgcgccggtgggggcatgttgtccgggccctgctcaaaaatcgaagagtcccgcatctgggcgctgctggttatgcaagggtttgacccccttaagtttgggtctttggttctgcggtggctagcgctgggtaccggcaaaagaaacactctatggttgtttgggcccccaagcactggcaagaccaacttcgctagtgccttagccagaacatgccccaactacggcatggttaactggaacaatgggaatttccccttcaatgattgcgttgacaagtctctgatattctgggacgaggggtatataaacactggcattgttgagcaggcgaaggctgttttgggggggcaggaggtgagagtagaccagaaaaacaaggggagtaggccattgaaacccactcccgtccttgtcacaagtaacgtggacatgacgataacccactctggcaatgtgacatgcaccgaacataggggggcgctgcgggataggatgatgaaggtggttttcagccaccgccttcccggagactttggactgatccccaccgaggaggttagagcattcctcgtgtactgcagagaacacccggttcctgtcgaaccagcatttgaaccccaaatcggcgacggggagcagagcgggggacgagggacaattgttccgtacttggacagggcagaggccgcagctcggggggcgaggaagagagggtttatggctaccctggacgaagaagctgatgaggacggaggcagcgaggggccctcttctccgaagcggccccgactagatgagcagtgtacgggatggcctctgtctgatccatttatgggggccagtcctgctgacagctcatcagttgaaggggaacctcctcaaaccccggttgatagctggacccagcatcccactcctccgcctactccaaaccctccgagcccactcgctatagagctgacacagtctccgactgatagcctgattgctgccgcccttgctgacgaggaccctctcgtccccccaggtaagccgggctcgggtgcgcggttgggatgcgcgacactgacacaagcttacagtcttttgctctgtttcatgtttccgcagaagcgccgaggaaggcccgtgtcgcacgtgcgctgaacttcgactcaccgtgtggaaatggctctccccggctcaaagaaaagacaccgcgacggtcgccctgtcatagccagtgaagagtgggagtgggaggagcattatttcgggagctctctagttgatgccagggctgggattgtggatgtgttaataaaactgtttagcaagcctcgggaggctgtattggaaggaggcgtccttgtgtcagatatcgagaaggaacttgaaacgcacgatgaggcggtcaggttcttcgcagatcacttaggattgatggggctgaaagatgcgaatggtcttagaaactttataaagggcgacggcaatctaagggcgaaggtcctactagatgcttggaggcactatggatcctcaaaggagcagggcgcagcaccccccgctgatcccagacatatagcaggccctcctctcacatcacagggcccggtgttgggggagcatgtccctatcacagaacaggtcgtggcaggagatcttgagccccctagaaagcggcctgcagacgatggtcatcgaggccttacactacccggcactcactacgttgggcctggcaatcgcctggaagaagggcccccaactactcggctggacgctgaggctcgcatacacgattttaggtatagtgagctccagaagctgggcattaatccctacacacacttcacatccgctgaccaggaactcctctcggcagccgccagagaaaagggtttccaggcagcaatggtcgaggctgtctttgagctgaaaaaacagctagcccctcatgctgattttcaggggaccttgccggccatctcgtcgtacgcgacgcaggaagaaatggaggatggagagggtagcggccagacactcggtggaggtggaggggctccggccgggcccaccatctggagcaacgagtccgcgttcgaaggggggaaagtcatttccacaatgtccagacaagttatcatccccttcgacccccagcagcggtacaagccgttctccctcccttctgggactgctggaggagagcattcatatgctgcgactctctctcaccccattattggatacgagaccccatggcggtaccttgacctcaactgcgcagagctgtggttcagcccctccgaatggcaacgcctcctcgagtcttcaggcggtatccgccccaagtcaatggagatcttcatctctaatatagtcatcaaagacgtcgcaaagacaagcaataacgagacacaggtgactgacagcgccagcggcgcgcttgccatcttcacagacgagacatatgactatccatatgtgctggggaatggacaggactctctcccgtcccctctgcctttcatcccctatatgcccccgaaatatgcatacttaaccatcgggcagaagtcaggccacaccggtgtcccgcactttgtgctccccaccgaggaaacctctttttacattcttgagcagagcacatatttgaccctgaaacaggggatgtcctattcacacaagtatagttttccggggaatctgccctggaaatcattttatggaccggggcagaattggctaacaatgggcaatccacttttagactctcgctatttcgccctgacagccttgggatctcaggctcaatggcgtagaattgggaaaaatgaatatggtaggatgccccaaaattggcagcctggtccactgactgtcacccatgttggagaggatggatggcatggggggtcagatgaaggacaggctgtattcactggcacatctgtgggtcagactgtcagtgagagatggtctctcagacccggaccgtcctcgcaggcattttcatgggaagacaaacacaatcctgaccgagacaggaacttcaaagtatccgtggatgctcttgcactaggcactcaacactcaggaaaggtgcagtgggagagcgcccgcctccctgatgacaaacacctgctaagaacattgcaaacccctgaccattacacatttagtgtaaaaaccagccccaagaacaacagatttttctctgagcaatatccggatgacagggccctgatgcccggcagtatctggaatgaaagacagtggaacctagaagatcagatatgggcaaagatcccagagacagaccatcactttatgaccagcacaccagcgatgggcgggtgggggatggagaagccacccccgcaaacattctttaagatcataccacaatacgcggaaatttcagagaatgatataggggaccctggcgtggacactgtgctgcctcttgtacatcagtatgcccaattcacgctatctgctaggtttgagtgggagacccagcccagggtaaacgacgccagatggaacccacagccccccatacaacctcctgcgggaagcaggcacattccatatgtgcctttcgaaaactcatatctgatgtccaaacacggaatatttaatgggcaagtgggatatgataagtctgcgagactatggggatgcaagggaagggttaaaaatctgtaatgtgcccaaaaataaagcttcacatcagaaaccag

SEQ ID NO: 289 - DNA, 4986 bp, Simian parvovirus
  source 1..4986: mol_type = genomic DNA; note = Simian parvovirus / Erythroparvovirus primate 2 - NC_038540
tcacaggaagtcccgccttagcaccggaagtcccgcctaccggcggcggcggcggcgctattgatttggtgtcgttctcaagggaaatgattgacagttcgagacgccattttgagttcggcgccattttgttgtttactttattttgattggttagtttaaaaaattctgtgttttaattggctaatagtgtgtataaagcagcaaacgcggaagtgtccggccatttgcttgctggtgttcggagagaacataacgcgggtgcttgtgctttaacaggtatttaacctttaactgttactaacaatggagatgtatagaggagttattcaggtaaatgctaactttactgactttgctaacgataactggtggtgctgcttttttcagttagatgtagatgactggccggagcttagaggacccgagaggcttatggctcactacatttgtaaagtggctgctttactggacaccccctctgggccttttttgggttgcaagtattttttgcaagtggagggcaaccattttgataatgggtttcacattcatgtggtgattgggggaccatttctaactcctagaaatgtgtgttctgctgtggaagggggttttaacaaagtgttagcagactttacaagccctactatcactgttcagtttaaacctgctgttagtaaaaaggggaaatatcatagagatggctttgactttgtaacttactatttaatgccaaaactgtaccctaatgttatttacagtgtaactaacctagaagaataccagtatgtatgtaattctctctgttataggagaacaatgcataaaaggcaacaaccatgtaatggggggtctgttgaacagtccagtgtttctttgtattctgatggagaacctgcaaacaagaaaagcaaggttgtaactgttagaggggagaaattctgctctttggtagattcacttatagaaagaaatatatttaatgaaaacaaatggaaagaaacagactttaaggagtatgctgccttaagtgcttctgtagcaggagttcaccaaattaaaactgctctcactcttgcagtgtcaaagtgtaactctccagcttatctaggagaaattttaactagacctaacactataaattttaacattagagaaaacagaattgctaacatttttttaagtaacaactattgccctctgtatgctgggaaaatgtttttagcttgggtgcagaaacagcttggtaaaaggaatactatttggctgtttggtcctcccagtactggtaaaactaacattgcaatgagtttggcctctgctgttccaacatatggcatggtaaactggaacaatgaaaattttccgtttaatgatgtaccttataaaagcattattttgtgggacgagggactaataaagtccacggttgttgaagcagcaaaaagtattttaggaggtcagccatgtagagttgatcagaaaaataagggcagcgtggaagtcagtggcactcctgtgctcattaccagcaacagtgacatgactagagtggtgtgcggtaacactgtgacccttgtccatcagcgagctttgaaggatcgcatggttcgatttgatctgactgtgagatgctctaatgctctgggattaatccctgctgatgaggccaagcagtggctttggtgggcacagaataacgcgtgtgacgcctttactcaatggcatctgtctagtgatcacgttgcttggaaagtggaccgtacaacgctgtgtcatgacttccagagcgagccggagccagacagcgaactccctagtagcggggagtcagttgagagctttgacagaagcgacctctcaacctcctggcttgacgtccaagatcagtcaagcagtcctgaaaactctgatgtcgagtgggacatcgcagacctcctctcaaacgagcactggatcgacgacctgcaagaagatagctgttccccgccccgctgcagcaccccagtggcagtggctgagccagtcgaagttcccaccggaaccggaggaggactgaagtgggaaaaaaactattctgttcatgatactaatgaactgagatggcctatgttttctgttgattgggtgtggggtacaaatgttaaacgtccagtgtgctgtttagagcacgataaggagtttggtgtgcattgcagtttgtgtttgtctttggaggttttgcctatgcttattgaaaaaagcattctggtaccagacactctaagatgttctgctcatggtgattgtactaatccttttgacgtgcttacgtgtaagaaatgccgagatctgagtggtttaatgagctttttagagcatgagtgagcctgcttccaaaaaacaaaaatggtgggacgaagaaaatgcttatagtgatgcttggctgtcagaattcaaagatataataaaagatgctattagcttaataggagaagaggaagaagtacctgtgttagctttaaagtttttgcagagccatttaaagttagatttaaaatatggtgtagacgcgttaagtggtagtgatgctttaagatttttaacagagcatgctttacctttgaatgctgtgaataaagatactaaaggagatagcactttgggtatttaccttaaacaacatttacaagactatatagacaatccagataagtacactttagacttgtctcatggacctctcccagatttcagagaaactgaggcagaacacaaatcctttaatgaacctagaggagatgacgcagtccttactaaagaagacttacacgaagggggtggagttagtcttacattaccctttagtaactacattggccctggtaatcagcttcaagctgggaatccccaaagtgtggtggacgctgcggctaggattcatgattttaggtattctgaacttattaaactgggaataaacccttacactcattggtcagtagcagatgatgagctgttacataacattaaaaatgaagaaggatttcaagcacaagtggttagagactttttcactttaaaaggtttattcacttctacagcccactttaaaggagagcttcctgcggtgccagaatattctgcatctgaaaactacccgaacatggcctctgtcacgtctactgaaggaactactggagctggaggcggtggcagtaacccggtacacggagtgtggcgtgagggagctgtgttctctgattcctctgtaacatgtacttttagtagagtttttgtggtaccctataccgctgagcatgcatatagagtgttctctcctcctgcagaaaattgccactctgcagcaaccggggaaagcaaagtgtgtgctgttagcccagtgatggcgtatgctactccatggcactatatcgatgtaaactgtgcttccttgtacttttctcccttagagtttcaaagactgctagaaaactatggttctataaaaccttcttccatgagtgtaaccctaagtgaagtttgtattaaagatgtaacagacaaaccaggagggggggtacaggtaacagacagcactacagggaaactttgctttttagtagatgatgagtaccaatttccctatgtattaggtcaagggcaagacacattagccccagagttaccaatatggacttatctactgcctcagtatgcctatttaaccgtcggggaagtcaacactaaaggccttacgtcctccactagaaaacaaccctcagaagaatctgctttttatgttctggagcacgctaactgcttgttgttaggtacagggtctagcattagcacagcctacacattcccaccactaacagcagaatcactagaaggggcttctcaacacttttatgaaatgtataatcctttatattcttctaggttagcagttccctctgctttaggaggtcagcctaaggtgagatttgtacaacctacagaccacgcaatacagcctcaaaactttatgccaggccccttagtaaacactgtcaccactgcagagggagactcaagcagcactggagcagctaaagctcttacaggcatttccacagggagttcccagaacaccagaatatcattcagacccggtccccggtctcaaccttatcactactatgatgaaattaatcaaaaatatataaatggcattgactctattagctatggggtaactacgtttggtaacacagcaaaaccccaggaagcttctcaagcagtagggcgttatccaaacgataaagaacaaagtaaacaacttcaaggcttagatattaaaacattttacagcaacaaaggagatcaaaagtacacagaagaaattaatagacctttaatggtagggtctatatggaatagaagagcttttcattatgaaacacaactgtggacaaaactacccaatttagacgaaggctttaaaacagagttttctgctcttggtggatgggctttaccaaaacctcctccaatgatattcttaaaaatgcaaccagccccaggacctgaagggtttgccagcataacaaacagcacactagcacaatatgctacgggggttttaacagtcactcttacatttgccttaggtccccgaaaacatacaggaaggtggaacccccaaccagcatgcatacccccccacgctgcaggacatttaccctacatattgtacgataccgaggtcaccaaaaactcccagaaccacagacacgggtacgagaagccggaagaatgctggagtgccaaaaagcgagtacaccctctttaaacattacgtatgtccgctgcaaaacccgcctccgtcaatgtatggggctttaagtcctcaggaaaaacatttaattcagtgttttagattgtgttctgcgtaccctaacttgcacggcttagtaaaaaaataaaaaaaaataaagttatataaactcaggttgcgaa

SEQ ID NO: 290 - DNA, 4242 bp, Skunk amdoparvovirus
  source 1..4242: mol_type = genomic DNA; note = Skunk amdoparvovirus / Amdoparvovirus carnivoran 4 - NC_034445
aggaagtagtgagatatataagcagaagctacttggagcaaagcacagagcggttacagcagagtaacatggctcaggctcagcttactgaacacaagagaatacaacaactgtttgagcagctaaagcaggaggttgctgacggtgaaggactcgcctggttgtttcaacaaaagacctacaccgacaaggacaacaaaccaaccaaagcaacaccaccactgaggacaacttctcctgaactaaggttagcttatgattctattgaagagactttaaaagcttctaatgaaaatttaactaagaatgacataaacttttgtaaactaaccttggggaagaccttggtgttacttgataggcatgtaaagagccacagatgggatgctaacaaagtcaactttatctggcaagtagaaaaaggagccactaagcaacttcatattcactgttgcttaggttactttgataaaaatgaagatcctaaagatgttcagaaatccttaggttggttccttaaaaaattaaacaaagacctagcatatacctatagtaaccatcattgtgacctgcaagatattaaggatactgatggcagagctgataacttgaaagtgtgggttgaagatggacctactaaaccttacaaatactttaacaagcaaaccaaacaggaatataacaaaccagttagcctgagagagtatacaataatatacctgtttaacaaaaataaaatagataaagaaggtgcagatggttactatgctagtggtaacggtggcattattgacatgctaactaacaaagaaagacaagccataagaaaactttacttggatgagcagagttcagatatactagatgctgacatagactgggaagatagccaaagcgcgccaaaagtaacggaccaaactgactcagcaacctcaaaaccaggaactagtttggtttggaaatcatgtgccactaaagtaacctcaaaaaaggaacttgctggtccggttaagcaaccttctaaaaaaatgtgctcagctcagagtactttagaggccttatatgagcttggttgctttactccagaagatatgattttaaagctaagtgacacataccttgaaatatctttagaaccaaacggagctcaaagagttaacactttgcttcacatgaaccaagtaaagacatcaaccaggcttactgcctatgattgtattcagaaatttaataaaraggaagatgagcaacctttgctagcaactataagagagatgggacttaatgaacaagaacttaaaaacgcactatgtaccattctaaccaaccaaggtggaaaaagaggttgtatttggttctatggaccgggaggcactggaaagaccttgctagcatccttaatatgtacagcagtagtaaactatggtgtggttactacaagcaatccaaactttccatggactgactgtggtaatagaaacattatttgggccgaagagtgtggtaacttagctaactttgttgaagactttaaagccattactggaggtggtaatgtaaaagtagacaccaaaaacaagcaacctcaatctatcaaaggctctgtccttgtaacaagcaacaccgacattactagagtagttgttggatgtgtggagacaagtgctcatgcagaaccacttaagcagagaatgcttaaagtacgttgcatgagaaccatcaaccctaaaaccaaactaacaccaggaatgttaaaaaaatggctaagtacctgggacggcacaccaattaaactaagccatgagatgcctgaactgtacttgggtaagtaccttcaggtaaggaacacattttaaatgccaactttaaaaccaacataaattgatgaggttactttactttacagagactactggaccaaactcgagtgccacaactgccacgaaggttactggcaactcacaacgtactactgcagagactgcagaaagtgtgaacacaaccagctgcgatacaccaaaaargggtgcgagcagtgtgcatccaaagcagcccaagagacctcggcatgagtaaaagtaagtaacctacttaaagtaacctaacaccatcacacttgactttgcttgtacttatgttactttactttagttcctcagcactatcctgggaaaaagagaagtgctccaagacacgtgtttattcagcaagcaaaaaagaagaagcaaactaaccctgcagtataccacggaccggataccatagaggaaatggatcctgctgaacctgaacagatggacactgagcaagcaactaaccaaactgctgaagctggtggtggggttggtaacagtactggtagctttaataacacaacagaatttaaagtaataaacggtgaagtgtatattacttgtcactctactaggatggtacacatcaaccaagctgacacagatgaatacttggtgtttaatgctggtagaactactgataccacaacaactcacgacaagctagacttagaattttttgtctatgatgattttcaccaacaagtaatgacaccttggtttctagtagatagcaacgcttggggtgtgtggatgagtcctaaagactttcaacagatgaaaacactgtgtagtgaaattagtttggttactttagaacaagagatagacaatgtaaccataaagactgtcacagaaaccaaccaaggtaatgcatctatcaagcaatacaacaatgacttaactgcgtcgctacaggttgctttagatactaacaacatattgccatatactccagctgcgccgttgggggagacactgggctttgttccttggagagcaaccaaaccaacccaatataggtattatcatccatgttacatttacaacagatatcctaacattcaaaaggcagcacagactgaattaaaatggactggaacacaagctgattaccttagtgtggaagaacagtactttaactttattactgtagagaacaacatacctattcagattctcagaactggagataactttcactcaggcttatatgagtttaaaagtaagccatgtaaactaaccttaagttaccaaagtacacgttgcttgggtctgcctcctctgtgcaaaccaaagacagatacaacacacaaagtaacctcactagacaacggaggtgagatacaatacatacaaggaggagatcatatcagactgggtcacttttggggcgaggagagaggtaagaagaacgcagaactaaacagagttagaccttacaacataggttaccaatatcctgaatggatcataccagcagggttacagggtagttactttgctggaggaccaagacaatggagtgacttaaccaaaggtgcaggcacacacagccaagctttacaacagaactttagtactagatacatctttgacaggaaccacggtggagacaaccaagtagacctattagatggaatacccattcatgaaagaagtaactactactcagaccaggaaatagagcaacacacagcaaagcaaccaaagttacatacaccgccgattcaacactccaagatagactcgtgggaagaagaaggttggcctactgcttcaggcacacactttgaagatgaggtgatatacctagactactttaactttgctggtgaacaaacactagactttccacatgaagtattagatgatggtgctcagatgaaaaagctactgaacgcataccaaccaacagttgctcaagacaacgttgggcctgtctacccatggggacagatatgggacaagaaacctgatgtggaccacaaacctagcatgaacaacagcgctccatttgtatgtaaaaacaaccctccaggtcaactccttgttaaactaacagaaaacctcactgatacatttaactatgatgaagatccagacagaataaaaacctatggttactttacttggagaggcaagcttgtactaaaaggtaaactaagccaagtaacatgctggaatcctgttaaacgagaactcataggagaacctggtatatatggtaaagaaaactatcacaaacagataccaaacaacaaaggtaactttgaaataggattacaatatggaagaagcactatcaaatatatctactaaagtaaccttgtattatatgttactatgttactatgttactgtgatgatatctcaataaaagttacat

SEQ ID NO: 291 - DNA, 4432 bp, Snake adeno-associated virus
  source 1..4432: mol_type = genomic DNA; note = Snake adeno-associated virus / Dependoparvovirus squamate 1 - NC_006148
cgccccacccctagtgatcgcgcgcgctctctcttggggcctgacggccgaaggccgtcagctgccgagcttcgctcggcaggccccaagagagagcgcgcgcgatcactaggggtggggcgagtgccctgctcaacgggttttttggtgggcggagcaatgacgtcagcggacatgtctggacatgtctttgagcaagtccatataaggagttccgccggatatgcaaatgagcaatcgcgcaaagcattttgggtagtcaccatgaataaaaaggacagcaagaaagatgacgccccataattttaataggaattttaaccatggcgttttacgaggttgtgtttcgtttgccaagagacaataacaacttgttggatgaagatagatatcagccagagttgaaagaagaagatgactggcctgaggaatatttaaccagtgaagatgccagctttatcggactagcgtatgctgtgctaagtgaaattcggagattctttggaaaggaactacaatggtttgcccaggttgaatggtgtcctactgctggttaccacatgcatgttttgttgaaccatcctaagctgagtaaccagacttatggaagaaaggtcaatgaactggcttgccgtatagtcgatacctttggcctaattaatccagaagaagtcatcagtacccattatgttaaaagcaactatggacataaaaaggtgagagtcattcacctagagtcttatttgaagaactactttttcagaaagactttagctcctcccaattataccgaggaaggagactataaaagagaggaagaagtcgtgctgtgggcatttacgaatatcgtcgcttggaagccattcgtgcggaatctcatcaagagatcggagctagcgactgttcctaagcaaccagagaatccggcgggagacggaccggcacctcgagtgactgcaggaacccgccattttatggaaaccatcgactggttggtgaaacatggaattactacagaacgagaattctgccacgccaaccgccctttgtacctgtctatgctggcttctacttcgggtgctgggcagattaaaagagcgctggaccaggcgaaacacatgatgaccagcaccatgtcagcagaggattacctgacaacagaagaggatgtgatcgaaccacctactgaaaatagaatctacaagattatgaaactgaatcgctatgatccagaactagcagctgctctcttctacggctggacctgcaagaactttggcaagagaaacaccatctggctgtatggtccagctactaccggcaaaaccatcatcgctcaagctattgcacatgctgttaaactgtttgctggtgttaattggactaatgaaaactttcccttctgtaactgtccagggaaactgcttatctggtgggaggagggcaagatgacaaacaaaatggtggagacggctaaatgtatactggggggatctgctgtacctgtagacatcaaaggcaaacccgctgaaatgtgtcctcaaacaccctgtattattactagcaatactaacatgtgtcaagtatatgatggtaatagttctagctttgagcaccaagaacccctagaggaacgcatgtttatgttcagacttaatactaaactgccatcgacctttggcaagatcacagaagaggaagtcaaacagtttattacctgggggaggagcttaaaggttcaagttccacatcagttcagagtgcctaccacaggagagtataaaaggccagcccccgaggcgaaagctcattcttcggatgagccgccaaaagagaaggtcgcgcgtattgatgactctctaaccaggtatgttaacaatattgatgagtcagctaccagtagagaaatgtttctagagattgctaatactaatcaatgtatgttgcatcattgcttttcttgtaccgaatgttatcctgaattgcttgatgacatggacaaggaacaataaacttactgataacagatatggattttctcgatgatttctttgcagataaatataaagagactgttaacgaactcggtaaaccggtcaatcctaaacctgtaaaacacattagcgaagctcactcgcaacctggcagcaggaggggctttgtggtgcctgggtatcggtatcttgggcctggtaatagcttggaccgtggaaagcccgttaacaaagcagacgaggctgctaaaaagcacgatcaagaatacgatcaacagcttaaagcgggagacaatccctacataaaatataatcacgcggacgaacagttccagaaagacctacaaggtgataccagtctagccggcaacgcggctaacgctctatttcaaggcaaaaagactctactagcgccccttggcctagtagagacccctgtcggcaaaacgtctgaaaagcacaaattagacgaatactatcctaaagctaaaaaggccaaacaaggcttgcagataccagctccacctaaaggcggagaagaagaagctacatcgtcacaatctggagggagcccagcaggttccgatactagcggcacatctgtcatggctacaggaggaggcggtccgatggcagacgataaccagggcgccgagggagtgggtaattcctcaggtgattggcattgcgataccaagtggatgggagaccacgtcattacaaagtcaaccagaacttgggtgctccccacttacgggaatcatctctacgggcctatcaactttgacggcaccacaggttcgggtgctaatgcagcctatgcaggatacaagactccctgggggtactttgacttcaatcgattccattgccacttctccccccgagactggcaaagactcatcaacaaccacacaggcatcaggccgaaaggactcaaaatcaaagtctttaacgtccaagtcaaagaagttacaacacaagattcaacgaaaacaattgccaacaatctcaccagcaccgtacagatctttgcggacgagaactacgacttaccatatgtattaggcagtgctacacaaggcacatttcctccatttcccaatgatgtatttatgttaccacaatatgcttattgtacacttcaaggaaattcggggaaatttgtagatagaagtgccttttattgtttagaatattttccttcacaaatgctgagaacaggaaacaattttgagttccagtttaaatttgaagaagttccctttcattctggatgggcacagagtcaaagcctagacagattgatgaatccgttgcttgatcaatatctgataggagactatggaacagatgcatcaggaaaccttatttatcacagagctggtccaaatgatttgaatgaattctacaagaattgggcacctgcaccctatgaatgtatccagaatattaacagcagtgataataccaagaatgctaattctataaatggttcaaattctaccaacaaatggggactacaaggaagacaagcatgggatgctccaggatttgttcaagctagtacctatgaaggtgcagcagcaggacaatctcttcttaatggcgtacttactttcgataaaagttcagctactacttcatctccagctgctactgcagtaaacagaacaattgaagacgaaatacagggtaccaataattttggtaatgctagaaataacattgttgctatcaatcaacaaacgaaaggaacaaatccaacaacaggtagtacatctcaatttgagacaatgccaggtatggtgtggtctaatagagacatttacttacaggggcctatttgggctaaaattccaaatacagatggacattttcatccttctcccagaatgggtggttttggattaaaacatcctccgcctatgattctgatcaaaaatacaccagttcctgctgatcctccaactaccttcaatccaatgccacagactagtttcattactgaatacagtacaggacaagtaactgttgaaatgttgtgggaggtacagaaagaatcctccaaaagatggaatccagaagtacagtttacttccaattttggaacttcagatccagctgttgatggaataccgtttggaattaataatttgggtacttatgttgaatctagacctattggaactcgttatatttctaaacacttgtaaataataaaaattgtcaaatttgcactaagaattgttgtcacgtggttgtttacatgcttgctaaaacacgcccaccaaaaaacccgttgagcagggcactcgccccacccctagtgatcgcgcgcgctctctcttggggcctgccgagcgaagctcggcagctgacggccttcggccgtcaggccccaagagagagcgcgcgcgatcactaggggtggggcg

SEQ ID NO: 292 - DNA, 5050 bp, Tetraparvovirus sp.
  source 1..5050: mol_type = genomic DNA; note = Tetraparvovirus sp. - NC_031670
tctcgccacactacctcgcctttaagaatcagcctcagacacccaacttccttttcggattccgccgccgaagagaatggatgctcctgcctttaccgctgtactgcaagtgcccaccaccgtctgtgagggcctcaatgtacaattcagaagtacagaagatctgcaccgcgaagtcccagatgagtacccagactggccagtaaccgatttacgggcatctggttcttattttgatttatctgtaaacttaggtcgtctcatgtacagggaactggtagaatccttccatatgattttacctatgtacatgttacccggaatgtatattcaggtggagcctagcgtgagtgatgggagagaatttcactaccacctagtatgcgaacagggtagtatgtccgggcgtgactttagcacgtggctaaagcgctggaaagtgtttatggatagatacctccttgaaggccatacctgggccttaacctggcagatcagaaaaactagacaaggccggttgtatcaagctgatctgagctttgtccagaggtacttattacctaagttgccagtggaacactgttggtttgcctggaccaacattgagcggtttaaaggaattatattaagtgtgcccaatagagtgcgctgtggcaccgaaggcggagccattccccttccatatatcactgaactcacagctgccacggcatcagaaactgtggaagctcccgctatggccggcaaaggtacagaccgtttcttgagtctaattgactggctagtagaccagggcattgctactgagagaaaatggctagccgccgacaaacgaagctaccggtcatttctgggttctagtggtggcgtgctccaggctcggaatgcccttgctgttgccaaaagagagatggtcctggctcacccattgttgggctatctacaacgcggaggacaggccatggctagcgataacaaggtggctgaactgtttaagttaaatggatacgacccatctgatgccgcctggtattttgccggctgggcccagggggtctgggccaagcgccgggcattgtggctctggggaccagccagcacgggcaaaactcttttggctgccgccatcgccaatttgagtcccagctatggttgtgtaaactggacaaatcaaaattttccttttaatgactgtcactgtcagagtctggtttggtgggaagaaggccgaatgactgaaaacattgtggaagtagctaaggctattttaggtggcgctcctgttagattggatgttaaaaataaagggagcgaagattttataccaacatgtgtgattattacatctaatggagatttaacagttacaattgatggccccgtcatcagttctgctcatcaggaagcattaaagaccagaataactatgtttcggtttcaacggctcgtaccacctggcctagccccgattccagatggagatttgcgtgatttttttagaactggatttgacttgttaaccacaaagggcgcacccccggaggcctttcaggtaccgcgcccatgtgaaaagccaatggacccacctgagtgcatcagtcctctacggctattggctagcgtctctgaaacgcgcgagcattggagttctgaggatgagtggttccctccactccgtcaaagcacaccagctgaagagtctagagatcagactccaccgaacaccccggaggctgcgagcccgaatccacccgtggatgaaattgtgtcacagccattcccaacatcaccgaccagtcacaggtaccgtgtcaccagtgaagcggctgaggtagagctgtggtggttgaataagctaagggacgaggactgggcagatcacctaaatttacgaggcccagagaaaccagtgtgtgctggacttttttattatcatctgtggctttcggagccctggaggtaccgacgccggttggccctcaccgaagcgtcacatcagagaagcttttacgactggaattggtggtgagttagctattttttgaatttataaatgtttataatactatttttttgttatctttgtgttttatagtggcaacactacgtgtgatacgccagtggttgttaagaaggacgagtaacgccctgttttaattgcaggtaagagatgtctgcggcagatgcttttcggcccggggatccacctcccctagaaaccctgatgcgcaagttaacatacaattcgggaccagagcccagtagacgtcggtggggtttgccgggcggatttatagctgatattactgttggcagtatatatgaaagagctttcgcggagcttcagaaatactccagaagcttacccatgaaagtgtacccagttaaacaactggctgaacagctatttaccttgcgccgttcaacaagcaaactacatcacatcatgaggttttatgtggacattgtccgcctcttgatacttgtggcaccggagagtattgctaatcggctcagagaatctacggaggcggtccggcagttttttgaggagcctgttagttttcagtacctacgctctcctaagatacctgtattgtatgacttacacagatcagcatgggatactcgcatcccatctgctgaagagattgaagcttactttgatggcatgttgtcacctattccagtggaacaacatccaattgtagagcagataaaggctcagtttttaaatatttttcatccgccacctatagctggagatggagtcggtggtgacggtggcgacggtattggaggagctgattcccctagtgaaccaaaccttgaacgccctcccgaagggagatttcttgtccccggttatcgttatgttggtcctggtaatcctctggataatggcccccctgagggcccagtggacgaggccgctaaacaccatgacgaacggtacgcagatatgctatctcatggggacgtaccatacctccatggtcatggagcagacagacttatgaatagagaaatagcccgggctgaggaggggggacagcttaccaatcctgttgatcagttggttggcaatgctatacgtggcatctggtcagctaaagagactgttggtgacctggtggatgctcaaatttcacaggttttaccccccgatcctatccccggcacaccagcacagccctcttccgccgtcacaccagccccgaagaaacctcggactggttcccctgaggaagatttgtctcctgggattgtttctgctgagccgagtgcgcgcgctgagacgtctgatactacagttatggccgcaacaccaacgggtggagcaggtgggggggttaaggtaaaagctcaatggattggtggaacatcttttactgactctttaatattgacttctcatactaggacaactatgttagctgagaggggaaactatgtacctgtttatcaaaagggtagccatacagatgaaactcaaccagtgattgggatgaaaacaccatacagttatattgacgtaaatgctatctcagctcatttaactcctagagattttcagcagctgttagatgaatacgatgagattcgccccaaaaaactgagtattggtatttcagctattgttatcaaagacattgcccagtccacaacagggaccacagtatcagacagtgcatctgggggcattgtagtgtttgctgatgactcatatgattatccatatgtacttggtcacaatcaagacacattgcctggccatttgccaggagaacactatgtcctaccccaatacggttatttaactcgtggtcgagaactggaagggcgggtcaacgacatcatagctattgctgatcacaaaacagagcagtactttttagaacaccatgatgcccagtgcttgggtgctggagacacatggggacatacttatgatttcccagatgacttaccctttaggcggctctccactcccagtcagaccctgtatgccagacataatccaattcctaactccaggttggctattatgactggagtaaattcagatggtaaggctgtatggaaaagacccacggggttagacgtggggcgcttgccgcttaatcacgtaccggggccgtctcttatgacccccacagatagtcagctacgtaacctcacttttagaactccagtggctattggtaatccacagacaacagacagatacgctatcaatccactagttcatcagccgtggtcggtaagaactgaggattcagcaggttcatacagtgttcacaactacttggggggattagcgtacactcgacgccaacatgaagagtcctacgatggccatcaagaagaaagtgatggcaccgttacaaatccatcgagagtggtgcagactgacactgatcttgcagcgcctcatgtgggtcatacattttttgtgcctggacataccaggatttctgggagtggccaagaaacaatctacaatcctaaattgtatcaagaaccagtatttcccctgtttcccggggcggtatggaatcccaatccattgacttttgattgtcaaatatggaccaagatacccgatacagaatgtcacttttttgctcagtatccgctcctgggtggttgggggatgaatagtcctccaccaatgatctttttaaaattgcgcagtcagcctggcccaccaaccgccggtgctcacacttcccctaagagcaacttaaaccagtatgcaatctttcacttgcattatagcatggaatttgaggtgaagcgacgaaagcggtctaggagacataacccagaaaaaccggcaccattccccgtcactccatccggccgtatgccatttaccttagccaatgtagtgggtgacccagaaaatggagagtatgaagtgccctctgatcaatggattgctcaaaactactcccacaagctttaagtgctttgctccttatgtagtggcttgctcaataaagattatcatttaaattgtatggtgtctgaggctgattcttga

SEQ ID NO: 293 - DNA, 5111 bp, Tetraparvovirus ungulate 1
  source 1..5111: mol_type = genomic DNA; note = Tetraparvovirus ungulate 1 - NC_028136
cggtgacatcacttccgcttacgtgtttccggttccggtacgtcacttccgcttccggcggatgctgacgtgtccttgcggacaggaagatgatgtggacttccgggacagcccaccctcgccacacctacctcgcccttaagaatcagtctcaggctgtgcacttccttttcggatcagccgccgaagagaatggacgccacctgcttcaccgctgtgctccaggtccccactgtcttctgtgatgccgtgcctgtgcagtttcaacaaccttctgtggtcctaagagaggtaccagacgagtatccagactggcccgtgagtgatctgcgtcaatatgcaagccactttgatctggcagttaacttaggccacatattgtatagggagttactggagtctttttctatgatacttccattgtatccccagccaaagttgtttctgcagttagaaccaagtaagtcagatgatcgggaatttcattatcatttagtgtgtgagcaggggcagatgtctgggagagagttttcaacttggctgaaaagatggcgcacctttatggaccgatacatggcaggtcaccatgtatgggggttgctatggaatattaggaagactcgccagggcagactataccaggctgacctgagctttgtagtgaggtatttgctacccaagttgcctgtagaaaactgttggtttgcttggagtaacatagacagatttcaggcctctttgttaagtgtccccaaccgtgtcaggtgtttaggtgagggtggagctattgctctaccatatgtagaaggggcagttgcagttcccggcggccaagctgtattagaagctcctagcatgggaggtaaaggtactgaccgttttttgtcactcattgactggttagtagaacagggcatagctactgaacgtagatggctaagtgcagacaagcgcagctatagaagttttctagggtcaagtggtggagtcttacaggccagaaatgctttgttagtggcaaggagagagatggttctcgctcaccccctgttaggctatttacaaaggggaggttctgccgtagcagcagataacagggtgatagagctctttaaacttaatgcatatgatccagaggatgcggcttggtattttgcagcctgggctcaaggcatttggccaaaacgcagagcattgtggctctggggccctgcgagtacgggtaagacattgttagccgcagcaattgctaacatcagtccttcttatggatgtgtgaattggactaaccaaaattttcctttcaatgactgtcattgtcagtctcttgtatggtgggaagaaggccgtatgacagagaatattgttgaggtggccaaagctattctaggtggagcaccagtcaggctagatgtaaagaataaaggcagtgaagactttatacccacctgtgttattattacgtcaaatggagatttgacggtgactgtagatgggcctgtagttagtactgtgcatcaagaggcattgcagacgcggatcaccatgtttcagtttaaccgtttggtccctcccggattagcaccgataccagaagcagatttgcatgacttttttaagtggggcagcgagctattaaaagacaagggcagtccacctgaggctttcagagtgccacgtaggtttgacaagcctactctgagtgacgtgtcacgcagtcctcgactgccaatcagagacgcgatagaatctcgcgagtcttggagctctgaagatgagtggttccccagttcgcgaagttcttcggcgattcgtccgaggacgagtactccgcagagctctccagcagctagccctcctacaccggacacggcagcggcgttggcgtccgggccgtttccagaggctgactccgacgaagaaaggtatgctcgtgctgcggatgatcctctgatagagagttggtggtgtcagtacctggccgactttgactgggcagaacggttgtacttggtgggaccacaaggccctcgcgcacgaggtcttttctactatcagctgtggatcagagagccttggcggtatcgtcgaaccttgcgacattcagaatccgcactcaagagcaaattatattcttggtggaactggtagggtaagtacacatgctacatctgtttatgtctttcagatctaagagtgaaaacacttcttctcagaagaaggtgactcagtccaagtaatctcttctcctaacaggtaagaccatgtccgctgcagatgcctaccgccccggtgatcgactccctctggataccctgatgagtaaaataacctatgacgtgggctttgaaccaacccgtcacggtgggagaggtggtggaggctatctaggagaacttacaactggtctgctgtttactaaagcctttcacgagcttagccgctatgcaagcaacctcccatatgagctgtttccaattaggcaactagtaaatcagttaatcaataaaaggcgagaaacaaacaacatccataaagttatgaggtttttcatggatgtcatcagacttctgcttactgtgtcacatggaccggctgagcagcgactgaggcaggcaatggctcctgtagcagactttttttatgaacccagtaggcaccagttcgctatcggcccaaatgtatcccctttgcaagacttggctagatacgctcatacagctcaaaaacctactcgagaagcaattgaagccttttttcagggcatgttatctcccatcaaacctgaagatagacctatattagacaccatacagaagcagtttgaggagtttttttatcctcctatagtggaacatgctggaccaggcgactacagtcgcgacggtgatacgggagctggtacccctagtgaatcagaccttgagcgccctgccaaccgcggactcttggtccccggctacaattatgttggtcctggtaatcctctggataatggtccccctcagggaccagtggatgaggcagcgaagcaccacgatgaacggtacgatgaaatgttgtctcatggcgacctgccatatgttcatggtcacggggcagatagattgatgaacaaagagattgaaagggcagaaaaagaagggcgtgtgaccggtgtgggtgataagctactgggtaatgtaattcgagggatatgggaagcaaaagaaacaattggtgatgtggcagatgttcaaatttcacaggttttaccccccgcgcccccgcctcaagtcccgggagtggactcttcagacggtctcccttcatccaagagggcgagacctggtatccctgaagaccccgttgcaactgattttgaccttgcttcgcctgacccgattgttgctccagacatggcttcagaggctaccgggggtgccggaggcggcataaaagtaaaagctcaatggattggtgggacgtcgtttacagactctttaattcttactgcccatactcgcacttcaatgttggctgaccgtggggggtatgttccagtttaccgtaaaggcagccacacagatgagagtcagcccgttatgggcatgcgtacgccttactcttatatagatgtcaatgctatatctgcacacctcacgcccagagattttcaacagttattagatgagtatgaagaaattagacccaaaaagcttatagttggcattagtgctattgtgattaaagatgttgctaccacctctactggtagtacggtttctgacagtgctagcggaggcatcaccatcttcagtgatgacggttatgagtacccttatgtattggggcataatcaagacactttgccaggccacttacccggggagaactatgtgcttccccagtatgggtatctaaccaggggacgtgagattgatagttcatcttctcatgatatagtgggcatagctgaccataaaactgaattgtattttttggaacaccacgatgctcagtgcttagggtccggggatacatggtctcatgtttatgactttcctacagatttgccttttcgcagactcagcactcccagtcaaaccttgtatgggagacataaccctatacccagctctcgtctggctataatgacaggggtagactctcaaggtaaagctgtgtggaaaagacctaccggcatggacgtggggcggttacctctcaatcatgtgccagggcctgcactcatgacccccacagacagtcagttaaagaatcttactttcagagctccagtggcaataggacacccacagactagtgacagatatgctatcaatcctttggttcatcagccatggtctgtgaggacagaagatcaagatggtggcacctattcagtacacaattatttgggaggtgtggcatatacccccagattacatgaagaatcttacgagggttaccaagaggagattgatggtactgtctctaacccgtcaagggtggttgtgacagacacagacctagcagcgcctcatattgggcatacattttatgttcctgggcatcagcgagttagtggcagtggaacagaaacagagtttaaccctaaattatatcaagagccagtgttccccctgtttccaggagcagtttggaatcccaatccactatcttttgattgccagatctggacaaagattccagatacagaatgtcacttctttgctcagtacccgctccttggaggttggggaatggcaaatccgcctgccatgattttcctgaaactccgtgcccaaccagggccgccttcggccggggcacatacagtgtctaagagcaacctgaaccagtatgcaatctttcacttacattattcaatggaatttgaggtgaagcgtcgccgtaggtcgcgacgccataacccagaaaagcctgcgccgttcccagtcacagagtctggacgaatgcctttcaccctggcaaatgataaaacagatccctctaaagctgtgtatgaagttcctgcagatcaatggattgctcaaaattactcccataaattgtaacgctttaataaatgtgattatacctgatgtgcttggtgtgagactgattct

SEQ ID NO: 294 - DNA, 5533 bp, Tetraparvovirus ungulate 3
  source 1..5533: mol_type = genomic DNA; note = Tetraparvovirus ungulate 3 - NC_035180
ggaccggaagtcgccgaatgatgacgtagtttcacttccgccacactcaagatggcggcggttccggttccggtttccggtttccggtgagtcagcacttccggatttggccacgcctccggatgccgtcataccgagccgaccggaccgacaggataagtgtcgagaataaggaagcgtgagtcattcttcgggtagacactgaagagggaggaactcgtcatggcaggtctcctgtacctcggcgtgctcaagctctaccggggcgacttggagcccgtgagatggctgcaaggagaccgtatggcgaacaggaacatgccggcacccgaggactggccgactgagcagctctgtgacaagtggggccgagaggtattcaggttcctggtcagcgtcttcgagctgattgacgagacgctgcaggtaacctacgacaattacttcagggagagaatttaccactttctgcaaatggagcccagcagccccgggaacccggcaccatttcaccttcatctcgcagtgagtcccccgcggcacaaaggcccgagggagatgggggggtggctgaagatgtttaggcaggctatgatagagcacaggccaggcacggccccccccttgtactttgagatgaggaagaccgctcacggccgctggtgggagggcgatcaggactttatcagatgttatctcgtgcctaagctcccccccggagacgtgatctgggccagcacgtctatgcaggagtttgatgaagttgtcctctctgagccgaaaagaagagactatgcaggaccacttcctcttggagatgggagccaagaccctagacagggaagtcaggaagagcaccttgggcccaccgtgaaaggccgagcagcagatagattcttgcaggccgtagactggctggtagacaatggctgctgcaccgaggccaagtggatcgagatggataagatgggatatcgttctttcatgtctacctctcaaggggtgctgcaagtgaagaacgctctgaaccttgcacgcagggaactcgtagcagggaacaaactgttggagagcatagtgaaaggtgctgacccctgggtacctggagttgtgaatgccgtagccaggctcttccacattaacggctatgacccagaacaggcagcttggtacctagctaattgggccaaggggggacatcaaaagaggagagccctctggctgttcggacccgctaacactggcaagacgctgttagccggcgcattcgccaaactagctccctgcttcggctgcgtgaattggaacaatgagaatttcccgttcagtgactgtgcctctcaatccctgatttggtgggaggaagggaagatgtctgagaagtttgtagaggccgctaaggccatactggggggcagcgagataagaattgatattaagggtaaaccttcagagcagtttatacctgctcccgtggtgatcacctctaacggtgacatgtgcaccgtgtactcgggcaatgtaatctccacagcccacgccgggcctctcaggagccgcatgctcaaggtcacttttagtcatgtacttcctgggggtcccaatgctgacctccccccctgggtgctgcgggacctccccagcttcatggcttacgggcagaagctcctgaacgaaagaggaactccacccgaaatagatcaactggccgtagccgcggtagctccaccctgccaagtttcgaccacagcgccaaagatagaaagctccgcccttccgcccatacgggaggagagggacacctgggactcggaggaggagtggttccccgaccccccgcagaatactccaacgcgcatgccccgagagcgtcaaaagacacgtcgcctcaccgagtactcagactctgagacggacgtcgaggaggaaccaaggtacggagctcctgcccgggaggctttggggtatctgttcctacccgagtgcaccagccgcagcacccggaggcaccagcctggaaagactctacagagagtactcagatcctgggaagccagacggtcctcggtggctcggagcgagtcggcgtgcatcagagctcggcacaacgtagacaactggtactaccatatcccctgcctttcccttataggcagaagcgtccgaccgtcgaacacggtcttgcgaccttggcaagcgtggctctaacctcggactccgatctccttccaggtaagcggccatgagcgctgccgacgcgtggaagccgggtgaccggcccccgctggagaacctcatggatgccatggacagatccatttggggcaatagaagaaacaactctggcgggcggagagggatcaatgcccttctgaggcctggctatgacccgcgcatgcgccaggctctcttacagctttacaagttttttatctcaataaacaaacacggtggtttctgggataaaattaaggaggtggcgaagcaatggtggatggcgggacaccagacctccaagggagacgagctagcgcgaacggtgctcgatctgggaaggctctttatggccgtcgtagatgactatagggaggacccagagatagatagcgtcaggcggagcatgatagattttctttacggggacaacgatgccactagggccttctttggactgcagcggttcgctgacacggtccgtttacctcagagagacgtgatgagggtgtggataacgggcgggtatagacctcagcccccgaaaggaagtccctggggtacctgggcagagcttgacctagacattcgtaattccttagatgcctcctacaaggcagaagaggaagaccgcccgaaagagattcaggtcgctcgtatcgacaatcctgggtctgcagccggagagcgatctcggccggcacctgaagagaggcctgctgagagtgctgaggctgttggcacagggtctgatggacagtctggacgggctgatacgggggccgaacgggaacgagattccacgtctaccgaagtgggaggatcagatggagctgagtcagatggaaaagggggaggactcaccctgcctggatataggtatgtagggcccggcaatcccttggatgcgggggagccgaggggacccgtagatgccatagctaagaaacacgatgagcggtacgacgagctcatcaagcatggccacataccctatattcacgggaggggggcggacacgatgatggggaaagagcttgcagatgccgaggaagcggggaagatcctcgatagttatgatcagttagtggcgaatgccgctagggggctgtggagagctaaggacacgttagcggatctcattggtggggagctggacaaagtcttaccgcccgatcctcccgtacagagcgagggggaggagtcccagaagagacctcgtgaggaggcggatcctccggagagcgccgactccgcccccaaagccccgcccgcccaaaaaccaagactagacgttccggagtacttctggacggaggaggaagagggcgccggagacgggtcgggtgacgacgagggtggtgggattgtgcgcattaatataccaataaaaatggagagtgctgacagcacccaacatcaacctcaaggtcatgggggggggccgagagcatccgggcattggcgcgcaggcaccgtgtttgggactcatggggtgacgactactcagacgagaatggttatactgagccctaagactgactacaagccgctgttcctggacgctgataccagtaaatttgactctgaaccaggcatggggtttttgacaccgtggcagtactttgatttcaactgctacatgaaccactttaccccctctgattggcaagagttagggaggcgatacgactccattaggcccaagtccttgactatctcagtagaaaacgtcgtaatcaaagacgtacatcagacgaacaacgagaccaacgtgcatgactcgggtacaggtggcatcatgatattcgaggactcagattatacgttcccgtatgtcattgggcatgctcaagagggaaacccgggtgcactgagtattcagtggtacaaccctccgcagtacgcctatttcacaggttttaatccaattgcttgggatcatgcaaacggtactactaagtatcgggtacatcccagtgcggacacggaattctttgttctagaggaacacgctgcccaaatactgcgcagcggagatgctacttcctttgcttacgagtttcccagtctcgagcctaagcgactgggtacccgtatgggcacgttgaacctccgtcataaccctgtactgcctagtagactggccatttatttgggagaggattcaagtaatgggccaacattttatcagcctcaggggactgatctggacatatttcctcaggggtttataccggggccaagaccgtgtcttccggtttccacacaactaagagctagcagcgatttcgatgagatgtcggcgatcgcctacggtgatcccacaagtaacaacaggcactctctcatgccatttaccagacaggcgacaacaatgtccactcaaagctataatcgccagggggaggtgcagagaaatgtacacttccaattgggtgacatggcctttgcgcggtcctctgctgaagattctttttatgaaagatttgatgaggacaaagactaccgcaatcctggtggctatgtcaaaaaaccgcgacccctggtaacagcagagagggaaggcctcggagaacgaccaggagacgcccttatggtgcccacctggggagcgcacctacctggcagcagtacaggacctggcaccacaaaaacggagaaggtatccctgcccttcattcctcctatgcctggtgcttgctgggacgagcgtcccctgtgttacgaggacgatatctggtgtaaaaaaccatacactgattgctctttcatgtctgagaagaataatctcggtgcctgggcgctggtagatcctccgccccaagtgttttttcgcatgcaaccgcaggtgggtccgccaccggcggacttggaccaacgaacctttctgccgcctgctttgaaccagtatgccatgttcactgtgagctacaccatggagtgggtgtgcgaaccgcggaagcacactaaacggcataatttggaacctccggctccgatgccttacacggagtccggcgaccccccgtttctccttactcgttcgcatgcttccaatgattaccctcgctattctttacctgtagaggcgtttcgcccagagggacgtgctcaccgtgtataaaaaggtgtcaataaagcttcgtcactctccacccgaagaatgactcacgcttccttattctcgacacttatcctgtcggtccggtcggctcggtatgacggcatccggaggcgtggccaaatccggaagtttatcctgtcggtccggtcggctcggtatgacggcatccggaggcgtggccaaatccggaag

SEQ ID NO: 295 - DNA, 5224 bp, Ungulate bocaparvovirus 6
  source 1..5224: mol_type = genomic DNA; note = Ungulate bocaparvovirus 6 / Bocaparvovirus ungulate 6 - NC_030402
ttttgttttctgtgtagggccggccgtgggcttgacctctctctgtttgtcgtgagcgtcagatgtggctaatagacagggttataagagtatataagtgagaacacattcagtctgtacttcctgttatcgtcgctggatgctgagactcgtcgagcggtgagtcgaaatgactacggggggcttaacaactactattgctgaaatacagagctttgggcatccatgttttacttacgtcatcaagttacgtcatgatcacgtgactgctgaagaagaggggttctatggactatgtgggggaacgaactttaatatgctcatgcaactaccaacttatgacttagactctaacagtcctaacaaagaagaacttttagaaacatggagtcctggagatggacatatgtgggcaatggcatgggcaggatggagagcatgcggagaactgatgcagaggagacagctcagagaaaagccagcattcaatgcttggtcacagtctgaaattggagaaaaagggtggcacgtacatctgattataggtggaccgggactgacaaaacaaaatgcttctatctcaaaatctctactgtgtactagtttctttaaacatctactaataactataagacagagaatgaacgaagaagaagatcagatgtctgaagcagaatttagagcttgggcatggcttcagcaaatatcagaaaaagtaatgaggggagaaaatgaagacgtagtagatatcttaaaaatgagatatcctaatggaaacttaacagcacaagcaattaatgggtcacagttcatcactagatacatgcttcctaaaaacagacaagtacttgctgcaatctcgccttttcaaacaacaccgagagctagttttgatggaacatggagcaaggactatgggtttaccgtatgcaatgggaaaaccatttgcgaatacactagaagggacctgtggaaggcactcttcaacacttatgttcaacatccagcagaaaccatgctgaatccaaatccagacgtatggagagacctaccaagagtaagcaaaactgttattgataatgttgatgcggcaacatcttctagaccaataaaactatcacgaaaacaaaaaataatgatggaggttattagaaaagctacagaacagctgtatttgacatataatgatttagtggtaaatcttccagatttaatacttatgcttgaggggatgccaggcggcacaaaaacttcagagcaactactaaccatgattcacattaaactttgtgcacaatataatgcatttgattttatgatgttaaaaactcctaaaactcacaatgtaaatctaaatgctgatgtatatgattgtaatgaaaatcttgtatttaaacttttaaaccaacaaggatacaatccttggcaactgggtcactggcttgtaatgatgcttgctaaaaaaactgggaaaagaaattcactgttattttacgggccggctagcactggaaaaacaaacctggcaaaaagcatatgtcacgccgttgggctatacggctgcgtaaaccataacaacaaacagtttccatttaatgacgcaccaaataaaatggtgctttggtgggaagagtgcataatgaccactgactacgtagagtcagctaaatgcatattgggaggtacacacgtcagagtagacgtgaaacacaaagactccagagaacttccacaaataccagtaatactctctagcaaccacgacgtatacacagtacagggagggaacgcaacatttggagtacacgcagctccactgaaagaaagaatcacacagctaaacttcatgaaacaactagaaaacacatttggagaaataactccagaaatgatatcaacatggctttcacactgcaacaccaggtttagcgaacagatgacactagaaacattccaaactaaatacaatctcacaaccataggaaacagcttcccattacaaaaactgtgctctggtcacacacagaattggacattccaccacaacggagtctgctggcactgcgggggattcatccagcctacagaagagacagactccgagcctgacagaaactctgaacatagcaatcctgattctgacgatagcaacacttctaatagtggtgagtctctccttaataccactgagacggactcgggcagaggcacaatctcatcatctggaccatccgtaccagacgacaacctagacatagacccgagtgagtgtttgcaatggatggaagacatacttaataccatgaatgcatatgacattgaaattgcaagcaataacgcatgtcctgctcttttagatattctcgaagaagagccaaccgagcagaacgggaatttggatcaagagaacaccgagccagagacaccggaagataaccatcaggatcccaagagagctcgtgtggaagaggaggtaagcaatgagctcccatttgaatcgcaacccattacagaaagcgactgggaagagtggcttcagtttagacagagagcgaaaagaaggagaatccagatacaatcagaagaagcgccaatggaaacagaagaacaaggagaagagcccggaccgagcgcatggggtgaaaaactggggatcatctcacaaggaccagaacaagaaccaatcgtactccactgcttcgagaccataccagactcggaaccagaagacgacaccgtttaatgttttcacagagcacagatcactgactaacacagacatacagttttgtgggttttactggcactctaccagaattgcttcaaagggaaccaatgacatatttaacacactaaaacaatcattccaatcacgcgcaataaatggaaaaatcacatgggacggggttagagaaattctgtttgaacaaaaaaaaacactagatcagtactacagaaatatgatgtatcacttcagattgggggaaaaatgcgagagatgttgttactgggacgatgtatataaaaagcacttagctaacattcctactacttctgtatccacagaaataagcgactctgaaatgcttgaagtcgctctgtcatttgatgccaccaataaataaagctaaaaaaagcggtctaactttacctggttacaaataccttggtccatttaattctctgtttgcgggaaaaccggtaaacaaagcagacgaagcagcgagacgccacgacctaggctacacagacttactcgacaagggacacaatccatacatatacttcaacgaacacgacgaacaactcatacaagacttacagacagacagaacatttgggggcatactcgccaaatcagtttttggcatcaaaaaagcagtggcgccagcactaccaaacacaaaaacaaaacaagccgaaagagcggctaagagaaaactctactttgcacgctcaaacaaacacagcaaacaggccaaaatggaagatcccaacatggaccacgacactgatgctcaggctcctgatcagccagacggtgtggccaggagtgggggcgggggtgcggtgggtagcagcgggagaggtggttctggagtgggctattccactggtgggtggaccggcggctccatttttacagacgacattgtcatcactaaaaacactcgccagtttatatgtgaaatcaaaaacggacacctttataaaactgaaactcttaacactggcgcacagcatgctgctcaatacgcctgcaccactccgtggtcttattttaatttcaatcagtacagctctcactttagcccgcacgactggcaaaaactcataaatgaatacacagcattcagaccagtgaaaatgcaagttagaatctacaacttgcagataaaacagatagtaacagacggagcacagggaaacacatacaacaatgacctaacagcaggcctacacataatgtgtgacggatcacacgcatacccgtacgtgcaacacccatgggacgatgagtgcatgccagaactgccaaaccagatatggaaacttccacagtacgcatacctgtacgggccaatcgaatcaatagacgagccaacaaacggagcagaagcagacataaaaaaaggaatcccattgtacatcctagaaaacacagaccacgaagtactgcgcacaggagaagcaacagaattcacatttaacttcggaaactgcgaatgggtggaaaacaacataagcagcattctgccacaaatgatgtacaacccactcgtgaaaaacagaaaagtatataatgtagcactaaaccaagccaaacaacaagtagcagcggtaaaatcctcaaactggtggccaggaccagggctaaaagacggcacatacagcaacaacacagaaacacaagccagcggaccatacatcactcgcacagacaaccacaacataataggagacactccagatggaaaaggatactccacatggccagccagaggagccatatctcacaacctatccagcaaagatctacactacgtgacaggaactgaaggagacgcaagtccaacactatggtacaacaaaagacacacaatgaccagagactacgtaataaacaagctgacagccgcaacagggacaagcgagatagtgaatgactggttcatgctacctaaccaaacatgggactctcacccaatagcaagatacaacccaatatgggtcaaggtcccacgagttaacagaaagaccatgtttgacactcaggacggaaccattccaatggaacaccctccggggacagtcttcatgaagctagcaaaaatcccaattccaggaacaggagactccttcctgacaatctacgcgaccggacaggtatcatgtgaaatcatgtggcaagtcaagaaaacagggtcaaagaactggagaccagaatacagacacacagtatccgacatgaacatagacgcctacagattcaatgaagcaggaaactactacggagcaagggagccaaatgacgcaatgcaaacaagatacgggcactcgaaagttctgtaaacaataaacacgcgacaccgacaacacacgcacattctatattttattccacatccccctgttcccacgaaaaatccttgaccctcaccaacaccgacccctacacacaaacaaaaaacaccaccacacagccgcccccccacaccaaaaa

SEQ ID NO: 296 - DNA, 4909 bp, Wuhary parvovirus 1
  source 1..4909: mol_type = genomic DNA; note = Wuhary parvovirus 1 / Protoparvovirus primate 2 - NC_039049
gcatagaatggatcaaaaaaactacatagagagctgtggactaagttttgtattcaaaatacatgactgcatctacaaaccaactaaagatggacaaggaccaaaaatcacatggagagactacagaaaaccaagcaaacatcctgacatacaagaagtctacaaactagatcaacaaactgtaagtaccagagatccagaaccggactctgaaattaacatagatggaacaccattcaaacaaggaataatattaacaagtttagttaaaaaaatactatttgactacttcaaaaccaaaaatataataccagaagaaattgactggttcatgcaaactgaatacagtgaaaatactgaactacacatccatgtaatcctacatagtgataaaatagactctaaatcaggcaaatggatgtgcaaatactttggagaaaaatggggcctaatgctttgcactgtactaaacatgccaaaagaaaacttatcagactttttcaaccaaactaaattcagacaaacagtagaaaatgatgaatgggtacaagtccttcaatatactcatccacaaactaaaaaaaaatattgcaaaccagttaactttggagaaataatccatacttatttcctcagcaaaaaacctattttacaaaaagcaaatggtgaatgtggttacatctacagctcagacagtggtttccggatgaactctctatgctttaatgacagatggttaattcaccaacacttacgtgagctatctatgagaaaggaaaccacacaaatacaaaccatatcacctcaagacaagaaaaaaaaaagattagaaactgcaaaagaacaatcaattaaagaaacaatctatacattaacaaaaaacaaactacatacagcagaaaaatggatgcttggtgatccagacagctacatccaacacatagcaaatccaggtggagaaacagtaataaaagcaacattagacatagtcactctaaaaatgagtgtagaaaaaacagcataccaactaattatagaaagcaaacatgaaaaaatcaaacatatcaaaaaatgcaaagcatggaaactaatgaaagacaacaacttcaatccaaaaaaaatatggcactgtatatcatgtgcacttaacaaacaaatgggaaaaagaaataccatcttactatgtggacctgctagcacaggaaaaagtctattagcacaaaaaatagcacaactagttggtaatgttggatgttacaatccaagcaatgtaaactttccattcaatgactgtagcaacagaaatctaatatgggttgaagaagctggtaactttggtggacaagtaaaccaatttaaagcaataatgagtggacaaagcattagactagaccaaaaaggaaaaggaagcaaagcaatagaaccaactccagtaataatgacaacaaatgaagacattacaaaagtaataattggttctgaaaccaaaccagaacacaaacaaccaattatggacagatgttgcagaatagaaatgaaaaaaagattagaaggtgactttggtttactagaagatggtgaaattccaagcatcttcaaatggttagaaagtaaagcattcctaccaacaatggcaaactactgcgccagatggggagctcctcctacatggggagaaaactggaatactaaacctaaagaacttggaacagaactcatttcagatgaagaaactgaaccagaaacatctaaacctaacctctatcaatcccttgatccaactggactaaacgcagatttccaacttcttctacaagacatagaagaaactgaaaaacaataccaacaatatatggaaccaacagatgaagaaattgcagaacttgcagaaaccggctatggtcaagcactaattgatggcactgcaattcaaagttcaaccagcagagggccattgaatgcctccaacaaaaagggaattagaggtaagtcactatcactttaacaatggataacctactaagagcactgcctgtgctcttaggctttctattaatgctactaattttcttgctattttgctacatctgctgcaatggaatatacaactttcacaaaccaactaacattcttggagctaatcacagaagaaccaacctaaccatcataatgagcttcatgcctgccttactaagcttctctgtaactatgcttatatgggccttattcatatggctattttattttcatgaaggaacaatagaacaactaaacatataccataatggaaactcactacaacttctccatcactcatcttcattaacaggttgggttcctcctggctacaactaccttggacctaaaaaattcaaacttcaaaaaaaaccaactaacccttcagacgctgcagcaagaaaacacgatttggaatacaacaaactaattcaacaaggacacaatccatacttctactacaaccacgcagacgaagacttcatcaaagaaaccaaccaagcaaaagactggggcggcaaatttggaaactacatcttcagagcaaaacgcgctctagcaccagaactggcaccacctaaaaaaaaatccaaaactgaaaaaggagaaccatcctacagctacaaaaacatcaaaccaggcaccaaaagaggtaagcctttctacttatttgttaaccttgcaaaaaaaaaacgaatgtctgctcccgctgcagaaaacaatgaccaacaaccagacgcagcagagccttcagtggctggagcaaaagctacaggaggtggcggtggaggtggatcaggtgtggggcacagcactgggagctttaataacaggactgagtttatttatcatggcagtgaagttactattatatgtcatgcaactagacatatccaccttaatatgcccgactcagaagaatacaaaatctatgaaacaaacagagggcctagattcccaaccgaccaaactctgcaaggtagagacactataaatgactcttaccatgcaaaagtacaaactccatggcaactactccatgcaaactgctggggctgttggttcagtccagcagactggcaacaaatgatcacaacttgcagagaatttaaagtagaacacctagaacaagcaattgacaacattgtcataaaaacagtaaccaaacaaggaacaggcgctgaagagatcactcaatacaacaatgatctcacagcacttctgcaagtagcagaagacaaaagcaacctaatgccatgggctgcagataacatgtacattgattcaattggttatgtcccatggagacccagcaaactaccaacatactgttaccatgtcaacttctggaacacaattgacataaatgctggtgctcaacaaaaccaatgggcagaagtcaaaaaaggcatacaatgggacaacatccaattcacaccaattgaaaacatggttgacattgaactcctaagaacaggagacagatgggactcaggaccatacacattctactgcaaaccaagcagcctagaatatcactggcaaagcactagacacaccggcagctgtcacccatcaaccacaccacaagccatcggcagtgtcggaaacaaccttgaaacattaaatgcatggcaatggggtgacagaaacaatccaagcagtgcttccaccagagtatccaacttccacataggatactcctggccagaatggcaatttcactactcaacaggaggtcctgtagtcaatccaggtcaaccattctcacaagctccatggggctcagaggttgcaggaaccagactaactcaaggcgcctctgaaaaagccatatatgactggaaccatggagatgaagaacaccaattcagagaaacttggtggcaaaacaatgaaaacatgactggacaaactaactgggcaccaaaaaacatacaccaaaaagaactaacaaacaatgttgctgcacaaacagccttctgggcacaaggctaccacaacacattcggacctttcactgcatttgatgatcacggagcacaatatccatggggagccatctggggcaaagaaccaaacacaactcacaaaccacttgcatcatctcacgcacctttcatgacagcaaatccaccaggacaaatattcgtcaaacttgctccaaactacacagacacagtagacaacaacggaaactcatcaagaatagttacttttggaacattttggtggacaggaaaactggtgatcaaagcaaaactcagaactccaagacaatggaacacgtaccaactaccatcacttgctgcaagagaaaccatgaaagaaactgtaccaaatgaaattggcaactttgaaataccatacatgccaggaagagccatgcctaactacaccctttaaccttctaatctactaaccaacaataaagtaagttactaacatactaatactactaattaataaatttagtttaataagtttagtttaataagtttaatttaataagtttagtttaataagtttagtttaataagtttagtttaataagtttagtttaataatataaatttagtttaataatttagtttaataagccaatatactgataccatggtgctgctatttctccaacataccctttccttactaaccatacttagtttaataggtttaattttactatgttatgaagaaatcatagttagtttactcctattacaatgcttgcaattagcccagctcttgcatagacttcactgacaccttttgtcaccaaaaaaatcaataaaaccaaccatttaaaatcactcaagactactgtcattattggaacaccaaccaaacagatataactgtataccaaactgtataaaagggtgggcgggtg

SEQ ID NO: 297 - DNA, 4350 bp, Red panda amdoparvovirus
  source 1..4350: mol_type = genomic DNA; note = Red panda amdoparvovirus / Amdoparvovirus carnivoran 5 - NC_077138
atattggttgagaattaatccgtcatttcctggtggaatacggaagtactagtatataagcagccgttacattgctcaaagcacaaagctgttaaagcaaagtaacatggctcaagctcagattactgaacaaaagcaacttctagagctgttcgagaaattcaaacaggagattgctgaaggcgagggtctcgcttggctgtttcaacaaaagacctacaccgacaaggacaacaaaccaaccaaagcaacaccaccactgaggacaacatcacctgaactaaggttagcttttgattctattgaagaatgcttaaagaacaatactaaacatttaactgctaatgaaactcaattttgcaaaataaccttagcaaagactttgatattacttgataggcaagtaaggagccataaatgggatgctaacaaagttaactttatttggcaagtagagaaaggaaaaaccaaccatcttcatattcactgttgcttgggttactttgataaaaacgaagatcctaaagatgtccaaaaatccttaggttggtttattaaaaaactaaataaagacttagcctgtatttttagtaactatcaatgtgaacagcaagatattacaaatgctgaagacagagcacgtaacctagacgtatggattaaagatggggttactaaaccttacaaatactataacaagcaaaccaaacaagaatataacagaccaatcaacctaagagaatatgtcctcatatacttatttaacaaggacaagataactaacgaatgtaaggaaggttactttgctagtggtaacggtggcattgttgacagcttaactactaaggaacgaaaaggattaagaaaactatacttagatgaacaaagttcaaatttattagatgatatggatgactgggatgacagccaagaggcgccaaaagtaaccgaccaaactgactcagcaaccacaaaaacaggaactagcttagtttggaaatcatgtgctaccaaagtaacctcaaaagaaaaagttgctgaaccagctaaacaaccttctaaaaaaatgtgctcagctaagacaactctagatttactatatgaatatggttgctttactccagaagatatgattttaaaaatgagtgaacaataccttgaaatgtctttagaagcaaatggacatcagaaagttagcactttacttcacatgaaccaagtaaaaacagcaagcgtacttaacgcctatgattgcattcaaaaatttaatgaagatgaggacgagcaacctttattagcaactttaaaagaaatgggacttaatgaaacagtacttaaacgagtactaggcaccgttctatcgaaacaaagtggaaaaagaggttgcctctggttttatggaccaggaggtactggaaaaacattgttagcatcgttactatgtaaagcaacagtaaactttggtgtagttactacaagcaacccaaactttccatggactgactgtggtaacagaaacattatctgggctgaagagtgtggtaacttaggtaactgggttgaagactttaaagccatcactggtggcggtgatgtgaaagtagacaccaaaaacaaacaacctcaatgtattaaaggttgtgtagttgtaacaagcaacaccaacattactaaagtaactattggatgtgtggaaaccaacgctcatgtagaaccactcaaacaaagaatagtaaaagtacgttgcatgaaacccatcaaccctaaaaccaaagtaacaccaggaatgcttaaaaagtggttaagcacctgggatggagtaccaatcaacctacagcatgaaatgagtgaactatacttgggtaagtacctgatggtaagtaacacattttaaaaaccaactttaaaaccaacatacatttataaggttactttactttacagaaaacgagactactggaccaagtacgagtgccttgagtgccaagaagactactgggttcttacaacatactactgcagaaactgcagaacctgcaaacacaacaaactcaaatacaccaaaaagagctgcgagcagtgcacctctgaaaaaggacaagagacctcggcatgagtaaaagtaagtaacttacttaaagtaacctaacactatcctaccttactttgcttgtacttatgttactttactttagttcctcagcactatcctgggaaaaagagaagtgctccaagacacgtgtttatccagcaagcaaaaaagaggaagcaaactaaccctgcagtacaccacggagaagacactatagaagaaatggattctactgaacctgagcaaatggacactgagcaagcaactaaccaaactgctgaagctggtggtggggttggtaacagtactggcggctttaataatacaacagaatttaaagtaataaacaatgaagtatatattacttgtcatgctaccagagtggtacacattaaccaagctagcacagatgaatacttaatatttaatgctggtagaaccaccgacactaaaacacatcaaacaaaaataaacttagaatttcttgtgtatgatgattttcaccaacaagtaatgacaccttggtttttagtagacagtaacgcttggggtgtatggatgagtcctaaagactttcaacaaatgaaaacactatgtagtgaaattagtttggttagtttagaacaagaaatagacaacgtaactataaaaactgttacagagaccaaccaaggtaatgcaactaccaagcagtacaacaatgacttaactgcgtcgttacaggttgctttagatacaaacaatatattaccctacactccagctgcgccgttgggggaaacactgggctttgttccttggagagcaactaaaccaacccaatacagatactatcatccatgttacatttacaacagatatccgaacattcaaaaaatagcaagtgaaacgcttggttgggatgcaattcaagatgattaccttagtgtagatgagcaatactttaactttataactgtagaaaacaacatacctattaacattctcagaacaggagataactttcatacaggcctgtatgagtttaaaagtaaaccatgtaaactaaccttaagctaccagagtacacgttgcctaggtttacctcctctctgcacaccaaaatcagacaaaacacacaaagtaaccagcctagagaacggaggtgatataacctacatagaaggaggagatcatattagactaggtcacttctggggtgaagaaaaaggtaaaaagaacgcagaaatgaacagagtaagaccttacaacataggttaccaatttcctgaatgggtcataccagcaggcttacaaggtagttactttgttggaggaccaagacagtggagcgacacaaccaaaggtgcaggtacacactctcaacaactccaacaaaactttagtaccagatacatatatgacagaaaccacggaggagataacgaagtagatttattagatggaatacccatccaagaaagaagcaactactactcagaacatgaaatagaacaacatacagcaaagcaaccaaagttacgtacacaagccattcatcactccaaaatagattcctgggaagaagaaggttggcctgctgcttcaggaacacactttgaagatgaagtgctatacttagactactttaactttggtggtgaacaaaccatagactttccacatgaactattagatgatggtgctcaaatgaaaaagctactaaatgcataccaaccaacagttgctttagacaatgttggtcctgtatacccatggggacaagtatgggacaaaaaacctgatgtagaccacaaacctagcatgaacaacagcgctccctttgtgtgtaaaaacaaccctccaggtcaactccttgttaaactaacagaaaacctcacagatacattcaactttgatgaagatccagacagaataaaaacctatggttactttacttggagaggcaaacttgtaataaaaggtaaactaagccaaatagcatgctggaaccctgtgaaaagagaactcataggagaacctggtgtatttggtagtaacaactaccacaagcaaataccaaacaacaaaggtaactttgaaatagggttacaatatggaagaagcactataaagtatctctactaaaggaacctaatgtcatatgttactatgttactatgttactgtactaatattccaataaaagttacatgaaaagtgatctacataatactgtgtactgtgtacttcctttttcaaccagaaatgacggatta

SEQ ID NO: 298 - DNA, 4284 bp, Desmodus rotundus parvovirus
  source 1..4284: mol_type = genomic DNA; note = Desmodus rotundus parvovirus - NC_032097
cagcgcccccgccctccggatgcgggctgggccaattagcaacgtaggaaatgtgacgtcaatggtggttgtggttatgtgtggacacagaaacgagtcattctgcacgtagacactatgccgggaggacataaatacaggcagtggtatgcaatgcgacagaagctcattacagaaggcaagtggttacaacgcagagaacaaagcagttcatctgacgttccatctgcagcgaaaaaaccccgaacagacgaaaagggtgagtcttcagacgattccattcctcctttagaagaagaacccacagcagaaggtaagctaacatttgtattatttttcatagatgtctagcggctggcagggaccccaaggcttctcagtactccttcaaactacacataaaacctatgctggcatagagccagatgatctcatccaagatgctgtctgtttactacaacacagatggcaaatggaatttgaaaccaaaaaaattgataatacctggtatgcctggggacgccaaaaacgcttcacagtaggagacctaacaattcaaagagccctgggtgatctgttcacagaggagctgataatcttccagagaggtgctccggacgattcctttgacagcgccttacgctaccaacaatgcaagcgcaagtggaacgtccccgagcaagtctctctgagctccgaagatactggtggaacggccacacctgcttggtacatgaagaagaaaaaaccttagatctccaatcactacaaaccatcctaaatacctgggactcacgtgtatggcaagcatgtgtattagctatatgggatgatgcattacctgtacaagatcctagaccatatgcttttttaatgtcttctattccatctgtaaaaatgtggtttttatgtgctgaaaatgattctaatggaaatatgcatatacatttattagctctaacaccacaaagatctgatagtttcaaacgtaccttagaacgaatatggaaggatgttgcaattgttgctatgtctgatatagaaatgcctgatcctaccttagaagttgttaaatgtcaaaaatgtcacaaacctagtagtttaatcagctatatggttaaagatcccatttggatagcagctagtgatttaccaggtatcaaaacatttcaatcaatatatcaacatgatttaggagaacgttttagagcacgacaggaaatcgaacgtatcaaaaaaggagatcctaatacagctcaaatgcacactattacagctgaaataactgatgtaatcatgaaccacaattgtagatcagtagaagattgtatgagagcagcacctgacatcatcgcaaaacacttacatagagctggattagcaacaatcatacaaaactgtattgcttgggtaacatctacaggaggaggatggtccatgcaaaacatcaatgctaaatacccagcacatccagattacattcacttatgtctcatacatcaaggcataacaccacaattatttgatccaatattttatcaatgggtcacaaaagccaatctcaaaaaaaatacattagtactatggggtcctacaaatacaggaaaaagtgcattcatctcaggatttaaacaatgcattaattggggagaagtagtaaatagcaacacatttgcttttgaaggactcatcaataatcaattcggtatttgggaagaaccattaatctcaccagaattagcagaaaaagctaaacaagtatttgaaggcatggaaacttccattcctgtcaaatacaggaaaccagtaaaattaccacgcacacccatcataataactacaaatcatgctccctggagattttgcactaaagaagaagaaatgtttaaaaatagaatgtttatttttaactggaaccataacatgcataacaccactttcacttacagagttagtgaatatagctgcgaatgccgaatttgtaaaacaagtcgaagcagcgagactactactagtgggggaacaactagcagcttgccgggaggagaacaacccatacaacaactggttccaacaaccctcacgacaagcaatgttccaaccagatccatgtctccacctagagaaagagaaatgggaactagaacagaggcagaaagagagggaacaacaacaacacttagcaggagcaacagtggaacaactacccagtacacagatacagagcaggagcaatgctccgacagctcaagatctagcagcagctccagcaccacaactccacacagcatacgatccggtggggaatacagatccagccataccacagagcgagatggaggtacaagtagcgggagctcaaaacgtttgggaacccgcagacctagacgagattatggtagatatcttagaaatgatggacatccctcaatactcacccacactccaacagcagatcattgctatattagacgacctatacgaaaacgcaaaactagccaagaagtggtggtgttggggaaaaccaaaacacaaaagacatggcctgaaattccaaccaccgaacctagattggatagggaaatgggctccttaactataccaacacgcttacaatggtatatgtatctctcctacctacagacaaaatatggctgaagatgtcagctacactaacacctacatggcatattggaaaaatggaccttacatctatcctaacaatgacactgatcctaaaagcaaaacaggacaagttatgtccacaggagaaatcaacaccggatggcatataataccaactatactatggaaacacttcactactcccaaacaatggtgtaatttcatgattaaatatgaagcttatacagtaaaaggatacactgtcactgtatataatcctatacctatgacacaacaactcgctattcaaggcaccacagcatttacagcatttaataacaccatatatacattaggagcacaagacgatatatacgaaactagttatcataactggtatttagacacaccattcaatcactttaacctcgcatataaagagggacaatataaagataacaataactcatggaataaaacagtatttccagtatactcatggcgcaccgcaaatccacgcaatgttagtgacaccacatattcatatatacctactgtactaagctactctacatggccacgcgtcgctaatgaatcagatatacccaatggactcttctgggacccactaactgatccagatagcatcatggaattaagacccggaaaaaacagtatgtcattttcctggaatgctcatgattgtgatactaataaatggtataatttagattgcatcgcaaaatggactccatatgttcatgacaatccattccaacacataggaagagcaggtcaagcaggatcatacaaaattaccaccaccgacgacccagatccattatcaacatactcatcatgggcaacaacagaactcaccaaagatgactttaccataccaaacctattaaacatgccagttgtgcccatgaactggtggtggcaagaaatgcagaaatcaatagcacaaacaaccacccttaaaaaacctgcattattctgggcaggcaccgaatatgaacaatacaaatatccacccacacaatgctttcttaaaggtgtaccattattcgacgacaatggcacacacgtagaaacactcactcaaggatgcttcagagtcacactacacctagcagccaagaaacgaagaagcagaatattcgctccaacatggggaccactagcatggacacaaatatactcaattgacgcaccaagagcaccaaatgcagtcagatatagaacaggaggagcaagaagaacatggacaaacatcgaaaaggaatccggagaatcaccatacaacatcagagaagatccatattctacaagcaccacatatgaccgcagcatcaccagcaacaccgaaacaatctccaaaccacaaatccgatatcgacaaatggtcaataaacgtgatcgcaccgcagaaaccgccgtcacaatgatggatctacaactcccacctaacctctaaataaagcttctgtgtccccacaaccacatccacattaacatattacctgcaatcccgcctcccaactaaaggcggggcccgtagcactagctgcaagaagctagagctgccacctcgtcttttgggtgttcggggacgtcccctgacgggaacacccaaaagacgaggtggcagctcta

SEQ ID NO: 299 - DNA, 4639 bp, Sea otter parvovirus 1
  source 1..4639: mol_type = genomic DNA; note = Sea otter parvovirus 1 - NC_030837
ggttggtcagttcatagaatgataaaaaagcgggcaattcaaactacatagcagatctttttggagggaatcctacacatataaatacacaaacacaaaaataactgctcactcttcaaaatgaacttctcagagaaagaagaaactgccatcacctggctaaaaaacaatgctgacaaacaaggcctcagttttgtcttcaaaatccatgatactatctacaaaccaaccagccatggacagcctgttcactgcaactggaaaaactacagaaaaccaagcaaagatcctgacacactagaagtctggaaacttgatcaacaaacagtgagtaaccgggatcctgaagatgggtggtcagttgatattcataaaactccttatgcacaaggacttatactaacagcartagctaaaaaatgtatgtttgactattttaaatcaaaagacataaaacctgaagaagttacttggttcatgcaaacagaagtaggaaaagacacaggcctacacatccatatactcatctcatcagataaaataccacaagcctctggaaaatggatagttagattctttgctgaaaaatggggcctatacacagcaaactgcattcctctacataaaaatgaactcactgaatttttcaaccaaaccaaatacagagacactgtagaaaaaggagaatggatacaagtactctgttacactcatccacagacaaagaaaaaatatgtaaaacaaatcaaaaccaatcatctaatagttaattactttttaaccaaagatctttgcaaaaaagaagatgaccttggctatgtctactcagtagacagcaacttcctattcaatgatcttaaccacaaaagcagaattgccatagcaacacacatgcaaaaaatctacaatgctagagaggaaaccacagtagaagacattaaaccacaagaaagaaaaaaaagaagagtagaaacagccaaagaacaaagcataaaagaaacaattgcacatctcacagaaaataaacttcatactcctgaaaaatggatgctcggtgatccagactcatacattcaacacatagcaaatccaggtggtgagtcagttataaaagcaactatggacattgtaactctcaaaatggcaacagaaaaaacagcataccaactaatcatagaacatgaaggcccacaactagacaaaccaagaaaatgcaaagcatggaaactaatcaaaaacaacaaaatgaatccatacaaagtttaccatgcaatgagctgttgccttaacaaacaactaggcaaacgaaacacaatcctactatgtggacctgcaagtacaggcaaaagcctactagcacaagaaatagcaaaactagttggtaatgttggatgctataatgcagcaaatcaaaactttccattcaatgactgtagcaacaaaaacctaatctgggtagaagaagctggtaactttggtgtacaagtaaaccaatttaaagcaattatgagtggccaggcaatcagactagaccaaaaaggcaaaggcagcaaatcaattgaaccaactccagtcattatgactactaatgaagatatcacaagagtcatggttggttctgaactaaaaccagaacacaaacaacctatcatggacagatgtgtcagaatctatctaaacaatagactaaatggtgactttggtttgcttgaacacaatgaaattccaagcatattcaaacacttgatcagtaaaggatttgaaccaacaatggccagctattgcgtcagatggggcggtcctccaacttgggaagaaaactggaatgtaaaagcaaaagaactcattcctactgcaacaccagaagaagacaaagacagtcaagaaagcaacaaaaatgaccatctacaacagaayaacaaccctcgtgtggtgaacaaacgtagcctagcagaaacacttgatccagaaggccaagaaattgattttcaacaactcttggaagggcttgaagaagccttttcaggaggagaaaacatcgatgatcttggctatggtcaagacctgctagatacaccaccggatgccagtgcttaaccgcgaaagaaacggtaagtacaatcaacacttcctgtaacctttattaaaatgtggaaacttgctctgatcatttttcacactctcttacagctactggttgctgtcttacctaaaatcatgggagactataaatatggactattcttcttctcacttggatttattttattcaccttactctttattggattactatgggccttctcaaaagcatggattattgcaccttaccaaaacagaagcagaaaactactgctaatgacatttttaccaactgtcatagcatttggatttactttggttacttggattgttttgatccacacagcatataaatactgtttaaaaaatgactacttaagctgtgcarctaactttaccatctcaaccaactctaccatataggttggactctacctggatacaactatctaggaccgggtaacaacaactttaagaagaaacctacaaatccatctgacaaagccgcacgcaaacacgatttagaatacagcaaacttatccaacaaggacacaatccatacatctacttcaaccaagccgacgacgacttcatcaaaaacactgaccaagcaccagactggggtggtaagttcggtaactttgccttcagactaaaaaaggcaatagcacctgaactggcacctccagcaaaaaaaccaaaaacagacaaaggagaaccatcttacagctggaaaaacatcaaacctgggactaaaagaggtaagccattttatctctttgtaaaccaagctagagctaaaaaacaaaaactatctaaccaaatgactgaccaaaatgccagtgatcaaccaaacgagcctgccactgcagcagctcctggaggaaatccaacaggaggtgggggaggtggaagcggtgttgggcactcaacagggtcttttaataatcgtgttgagttccattatcataatggtgaagttactattatttgtcatgcaacaaggcaagtgcacatcaatatgtcagaccargaagaatacttactctatgacacagatcacggaccaagtttcccaagaccaaatgaccaatcagtccaaggactagatataatcaatgactcttatcatgcaaaagtagaaacaccatggcatgtactccatgctaacagctggggatgttggttcagtccatcagaattccagcacatgacaacaatttgttctgaagtagaaataattggttttgaacaaagcatagacaacattgtcatcaaaacagtcacacaacaaggcacaggagaagcacaaacaacacaatacaacaatgacttaactgcactcatagaaattgctgaagacaaaagcaatgttctaccatgggtatcagacaacatgtacattgactcaataggatacattccatggagaccaagtaaactaccaatatacagctaccacacaaactttctaaacacaatcaaactaagtccaagaacaacagtacaaggacaaccagtagatggaagatgggaccaaatcaaacaaggtatcatgtggggagacatccaatttacaacagtagaaaactcagtagaaattgaccttctaagaacaggagacagatgggactcaggaccatacaaattcaacygcaaaccaacacaactattctaccattggcaatcaagtagacatgtaggttcatgtcatccatcaaccagaccagacacagcaaacggacaaggcaaaaacaaaggtgacataaatggatggcaatggggtgatagacacaacccaaactgtgcaagtacaaaagtacaaagccatcacataggctatgaatggcctgaatggcaatttcacagctcatctggaggacctgttattaatccaggacaaccatccagtatgggtccatggctaacagcacaagacccacgaataacagcaggtgcaagtgaaaaagctacatttgactataatcatggggactcagatccacaagcaagagaaagatggtttatgggaaatctacaaatgacaggacaaacaaattggatactaagaaatttccaccaaaatgaactagrcagtggcatatcaaaagaaaaagacttctatattggaggataccacaatacatatggaccatttactgcatttgatgatattggaatacaatacccatggggagctatatggaccaaaataccagacacatctcacaaaccaaccgactctgcacacgcaccattccaagtacatgcaccacctggacaagtactaatcaaactagctccaaactatacagataccttacacaacgaaggacaaaatgcaagaatagtaacatttggaaccttctggtggaatggcacactaatcttcaaaggaaaactcagaacaccaagacaattcaacccttacaatctaccaggtataccagccggaaaaaatatgcaatcttttgtaccagatggaattggaagaattgaactaccatatatgcctggacgtgcaatgcctaatttcactatgtaacttagtaagtt

SEQ ID NO: 300 - DNA, 5049 bp, Sesavirus CSL10538
  source 1..5049: mol_type = genomic DNA; note = Sesavirus CSL10538 - NC_026251
tttcgacacgaccgagcccacccccgccccttgtacacttgctagaatggccacaccccccccacctcgaacccaaatatgggaggagttatgcaaaccaacccttcatataaccaagagctcagacctcagacctcattcggttagggacaggtggtggccacatacggacccggagactacctgatggaccccgagttcttcctccaacaggtgcgggaatacataaacacattcggaggaaaagccatcgcccaccaggtgccgaccgaagaccttgtacagaccatacacgaccggtgccacccaagagatgaacagcaccgtggagtggaatccgggagacacgtttgctggcgttgtgagactagcgggaaccgcggatgggtgcctgaccccatctaccgctcccctgtggggggaaccattcctagaccactaccttgggccccaggaaggcccaaccccagggtcgcccgaacactgggcatgcgcaacaggagctctcttctgccggctcctccgatctcgtctgactcagacgatcagagggaaccccctactgatagttcaggtggagaaagcccagggggggagatggcatattcactacgcctacgaaccagcggggagcagcgcgagggaaggggcggacgtcctgcgccgcgtgacccaagacgccgcctcaattatgatgacagtggacccctggactgtcatgccccggaagaataaacaaggagggtggaggagggtagacaagtccttcattaacaactaccttctacccaaacaatacccagaatgcgtctggagatgcagtgacttcaacttcatagaatcgtccagagagactgatgtgatcgaaccagaaccagaagaaccagacggcggaggaacctccaaaaaaggtaccaaactgaaacagactgaaagatggtgcctcacgcacgctatctacactgacaaggcttggttacaacactcacatagcagcttctataatcacaaggctacaaccacaggctgccacatgatgaaccaagccctagcagcagccaggatgcaagcaacaggaccagacttcatcaacttaagactacaaatgaatcccggatgggaagacgaacccgccaccgaacccaaaaacaataaggtaatccaactactcacataccaaaacctggaccccggttactgtgcagtcatattttacaaatggctttgtaaagaaacggggaaaaagaactgcatctggttctatggaccacctaccaccggtaagagttggatagcagacgggctggccagattcgttgccaactacggaactgtaaaccacaataaccccaacttcccattccaagacctggtcgacaaggccctcggttggtgggacgaaggtatgatgacaatagaaaaagtagaacaatttaaaatgctagcagggggtcttccaacaagggtggatatgaaatgcagacaatcggtagaaattataccaccaccactaatgataacctcaaatggagacatcacactagtacaccaaggaaatataatgtctgtagaacacagaccagccatacaagacagaacgatgcaattctgcttcaacagccgcctcagcaatgacttcggggtgtgcccagaagaacacatgagagaattcctggtatgggggaggaaactaagtaacagagataaatggtacccagagagcgcgatgcacagacccataccattccaagtcctgccgtgtgacagagctctgccctgtctcccgtggagagacccggccgaaccagacacgaaaaaggcaaggaccgaagcgacaacccccccggcaccaccaccgtcccctgaggaccccggggaaggaccgagtgcacaaccagaccaagacctactggaaaaaatctgtaagtattacacttattactttaaacaaaaacaccctatgaaacagcactaaactaatttcttcagcaggccaagacatcgagtgggaccccctcgagtgggacgacccaagggaagactgaaaacgacataaggtatggtcgaatgggaccccacacgagtaatagaatggcaaaaaaaagcagtatgggaggaacagatgaggacaaaatacaacacagaattagagagaaatagactcacacagcaaatcaaagcagacgaagacaccaacgcgacaccatggttaggattcccaaaattccaacactggtactatttctcatcacaatccatatggaggtcacagagagccagacacaaaatgccatattcagccagacaagtttacagagcataccaactatggacaaagatagctacatactacaaatggagatatgacaacacacaagacataaaatacctcagggaatacaacgacatggtcagagaacaattcaaagactcattcgagacttacattaatgacatgcaaaaatcagtgagactgactctaaacctagcagacccggacgataaagaagcctctgacattctccttaagacattagaagcccccaacaaatacactgacagaaagtggccaggatttcccctaaaagactactatttaaaaagaaaacaaaaagcagaagaggaagccgccaaaccccctgatccaccacccccacccccacagataatagaggaagttaaaaaagcaatacaaaaagaagaagatgagcgaacccgagcagaagaaggagagggacgagacgcaggcgggggactcacagtgcctgggacatcttacgtgggccctggtaaccctgtcccggctggtccaccaagtggaccggtcgatcaggcagcactggaacacgaccagaggtactcttggctcctaagtctaggggattggccatatctattagcaaacgaggcagacaaaattatgtctgacgacctcgaagaaaaagcccacactatgacaagctcagaaaaagtcctagctaacctagtgagatctgtatggcacataaaagaaaccctatcagatatgttcccggacttagccaaaaccctcctacacggaacaaaaacgggaacagaaaccaaaaagagaccatatatagaaccagaaactgacgcacctgcatttaaactcccaaagagagaagacgaaagtgtgagctacgacggggagggttcaactgtagttgtgactggccagacggaaggaggaatgagcagcagcacagagacagctgcgggggacagctcagtgaacggaggagggggaggagccacaccacaatgtggaggaacattctggggaggatcatcgttcaacgacgggttcataataaccagacaaacgaggagagtagtgactgatggatcactagacacatacaaaccacacagatcgatgactgcaaccccagaagtaatagtagcgacaccctggcacttcctagatatcaacaaactctcttgccacttctcacctgccaacttccaagagatgctagaaacaggagacggactcagaccagtacagatgagaataaaaattcacgaactcattttcaaagatataaccacatccaaagaaggcactaccacagtgcaggactcatcctcaggcatactgctaatcacagaggacaaaaactatgacttcccttacccgatgggaggaggacagttcacaacaccaggccacctaccaggagaactatatgctccaccgatgtactcatacagaacacatggctacatgaaaccacaaacagtaaacaactatgcatacccatacggcccaggaccaaacacagagctattcctactagagaaccaggacttacagctgatacactctgggcaatgctttgaacaaatatacaacttcccagaatcactaccatttcaaccactcacacaatatccatgggacgccagaagggatgacaacccgacatcagaacagagactagtagtcatgcaaaaagaaaaggacgaagactcagccagacaaggactaaacctacaactagggccacagggaaaaacagactttgtatacttcagcaatagactacccgcagcctggctggcgaacccaaggtttgctgacggggacttgctacactttgaccacacagaatggaaaggagcagacttcacaaaaaaatcagagaagaaagcgagacctgatcaggaaccagctaggatcactgtcagagacaccacaccatatggaaactatgaaaaacaccagacatttcaaccaggcccagccacggtagataatgcagtcaggagaccagagggagacacactgatcacatctaatgcactagccacaatagacgaggaagaagtcccattcggaataccgaaacacagaaacttaaatggcagactcttcatactagaacagataggacacggggcaccgacagacccactacatatcagagacacaaaatttgatgacattaagctgccaaatccaggacaagaaatagctgcaggtctctttccaggtagtctcctagaagggcagagtcccgggctcgagtcacagatatgggtaaggaccccaaacacacaaggaggcgccatgctcccggaattcaacccactcgcaatgtgggccatgaagaaccccccgcctacgatttttctccgtatgttgaaaccccttggaccgccgatgatccaagatggaaagattataccctcagaaacaacggtaaaacagtactgtcagttcctactaagttacgagatcaaatgggaaataattccaaggaggagagggacgaagagatggaaccccgcacccccgatacaaccccccgcaggtagagaccccagccagcctgtttacaacctgaacttcgatgacagcggcaacgtgagatataacaagccagacacggtctggatgcttcgccaacgcccccgctttaatagatgatcaataaacaaacctgatcaaaccgcatctgactttgtctttctaacgcttcgacagaccggtagctaggcgttcctaatgcaaagcgccgccca

SEQ ID NO: 301 - DNA, 4844 bp, Slow loris parvovirus 1
  source 1..4844: mol_type = genomic DNA; note = Slow loris parvovirus 1 - NC_025891
tccaacggtcgacgctccgcccactatgacgacacttccggtttacgacacacgtcacttcctgtttacgacactgtgacgtacttcctgtctgttcgcttataacccccgcgaacgaacgaacgcgctcagaagagactacaacatgacagaggacagacctgatctctctccgctgaacggcaaaggtttttgggaacttgttattaaactagtgaactctccttggactgaaaacagtactctgttttctaaatatgactggatcgaattttgtgaccttgagggatcagatgatccgtggtatgattggcccgaggatgagatcgatatatatatggccattctgggaatcaaagccattaaagcaattacaagagttcttagagaacgatctaaaaacaaaacatgcaattattttggacagatcgaacaaggaggagaattctttcatattcatttgttatttgaagtagatgggtttgttagtttcttactaggtcgcatgttcgaaacccttcggcagactctgagaaattctgtttactttggttatccatttgaagtgtcgagtgaaattgcaattactaaagtgaaaactggggggcgcaataaagtacaggatggtagttacattgtaaattatctcttaaagaagattcctcctggtgaagttcagtacgctatctctaatatagagtgcctcagaccgtattgtaactctgttaggaatagacgtgctttgttagaatctgttcctgtttctgttgaacgtttctcagagccgatcattatgaagggtaaaactgtggataaatttatgcaaaccctgcaatggtgtgtagatgaaggagtgacttctgaaaccatatggtataaaaaaaatcctgctagctttagaagctaccaggtcagtgctcaaagtagagctcaagcaaagagtattttgactcaagctaagatggaaattcaaatttctaaaaggttgtccgattatttgtgtcgggaacctaaagaaaatgagttgttttctgaaaactatgtgagtcttttgtttgaggctaacggatattctgcttctaaagcagctgctacattggctcggtgggccgctcatcaaagtggtaagagaaataccatctggctttggggtcctccaaccaccggcaaaactctgttagctagtgccattgctaactgttcacctatgtttggaaatgtaaattggaataatgctaactttccattcaatgattgtcataaacaattgctaatctggtgggaagaaggtagtatgcttcagaaatttgttgaatgtgctaaggctctccttggcggaacaagtgtcagggtagatcgcaaaggtactgacagtgctcttgttctaagaactcctgtcataattacatccaatactgacatgacatgtgtagtagatgggcctgttaaaagttgggaacataaggaagccttagaagatagaatgattaagtacaattttgaacggagattacctatgaacttaagatctattacagaagaagaaattaggcagtttttctggtttgggagttgtttgcagtgtccccctttggagtttttggttccgcctgatgggtgtgattcggaaactgcctaccaaaagcttagttccctttttgccgcacccttgggagatagcactataaaaacaccagatctgaacagcagccgttatatcgacgacggcgacgaaggaccttctgagcggtcggtaaaaaggcgtaggttgagcctctgttctgtaagtacagaagaggccgcttcagcggcatcttgtttattagacttgtgttctggtagctttagtgatggctctgaaggggggagtttccgggaagccctggggaactagccttgggcatgcctgggaatctatattggcagccatactaggtgaacagtacactcatgaggactttgctgcagattaccgagactttaatctgcatgtagaccctagatttacaactcacttacatctgggctctcgtactcggggttctgttcacctaaagaggttgcttgagcaagtaggtaaagatattcataataagaaactgagtgctgtggctcttgaaaatgttgataactggttggagcatttgcgtgatgtgtttacaaaacaaagaggctctgagcgagagatgtctctctctgatgcaatgcgaatcactcattacctacagagtgacgactttgggaaggatgagtgggacgtcacaggcccaaatagttattactctcgacttaacagtagaaggaaacaagtttcagatcgcctcagtgaacgcgacggtgaacgggcggacaccgattccacgaccactggaccatctactggaggagttgtgtcagaagttcgggtgcctgagagtgacacctccagcggacgaaaactccagtccatagaggaggaacatggctccgaaactgaagaggctcctcaggcaggcgattcaaaacgctcaggctttgttgtccctggctacaagtacatggggcccgggaatgacccagatgtcggaccccctgttaacgctgctgacacggctgctcgcgaccacgatctccgctatgcgcagatgcagaacgctggcattaacccgtacgttaagtataacaaagctgatgaaaaaatgattgaagagctaaaatctaacccagaagctgattctgatcttgcaggtaacgcggcgcgggctatttggaaaggtaaagaaagactaactgatgttcttgatccactcttacagaaagtagctccggacattccagcaaagcctctaaagcagtcagagcgccctccgcctgtccagcccatacctcctccacctacatcaccgtcgaagaggccatcgagtccgatcttggacggtgtcccacccgacaagaaaccgaaagtttcgatcccttccagccaacaggagcagccctccagcattgtaagcggtgtgggtggaagtggaatgactgaatttgcttcacttcctggttccggcggaaccactcatgccgttgacaactggaacgcagggtgtcattttggggatgattttgtaataactactcagtccagagtgtgtttgttggagtgccgtgaagataagtatgtgagcattcatcctagcagtacagaaataaaaaatttcttctgctacgggtataagacgccttggtcttacatcgatcttaataggatcgatattcattttacgcctcacgattggcaaacgctcacagagaactacgactctattaaaccagttagtttgtcttggcacatctttcatgtaaatgtaaaagatgtctccactcattctggtgacaccactctggctgatagtgctattggtactgtctgttcttttacagatgatgattacactttaccttacgtactcggtaattgtcaggacacactacctagctatctcccctacaccatctatcacctcccacagtacgcgtactgtacagtcgggggggagaacccaaaagtcagatatctagggtccttccatgttcttgaacatcggaattgttctcttcacagagctggtgatcgcattgactacaactatgaatttccttcagatttaccaagctatcgcttgtatgcctataaccagggccttttccatactgacaaccctttacacaaacagtacctgtggcagcccaaaaagatcgaaaagaatacacaagcgaatgcctcacaacaaggatataatgttacttgggaacaaagtgaggctaatgactataagaacaagtgtgttaacttcatgcctggtccaagtctgagcagtgtcatgcaaggtgctaaagacgatctgaaagaaatatatggagaccaggactatcgagtgacacacaatacctcatacttaggtactggttctcagaaccacatccagcacagagttagctatggtgatcatgagtattccattcgacctgggccacacggacacgtgactactatccacggaaatagaggccctgtgtatgacgtgcttagtgctgttggctacactggttccactacaagcacgccgagatttccagatgagtcctttgacctattggtcaatccttttagtggacatacatattcactatacagtgatcgtaatgtcaatgctaatgctggcatgcaacccactgcagagacaatgtatatcatgcctggcatggtgtgggatgaccaacaattacattatgaaagtcagatctgggcaaaaatacctcagactgatggtcactttcactcaaaaccctttttaggtggatggggactacataacccaccgcccatgcattttcttaaacttctaaacgtgccaggaccacctacaagctctggttcaccttccatactaaaccaatattgttcttttgtattgacatacactatcaaatggtctgtgaccaaaagcaaagggaccacacagttcaacttccagccaaaagtcactccacctctcataccagtgaagggtactggaggggatagcactgacccgaccccagtatattgtcctaccagtagtggagaagtcatctacccagatcgtgtccctggaagtcgagtaaaataccgacacatgtaataaaataaataaaattttatgaaccatatatactctcttgtcgtgttgtagtctcttctgagcgcgttcgttcgttcgcgggggttataagcgaacagacaggaagtacgtcacagtgtcgtaaacaggaagtgacgtgtgtcgtaaaccggaagtgtcgtcatagtgggcggagcgtcgaccgttgga

SEQ ID NO: 302 - DNA, 5402 bp, Canine minute virus
  source 1..5402: mol_type = genomic DNA; note = Canine minute virus / Bocaparvovirus carnivoran 1 - NC_075119
ccgtcctccattttgatattgtctttatatggagttgtagtagtatacgtcacatccggcccgtctcattacagcgagcggcttcgccgctgcggcctgcggccgcgctgtatatgttccttggccggatgtgacgtatactactacaactccatataaagacaatatcaaaatggaggacggaagtgtgattctgcttactcatagttatataacacacttatgaatatgctaatacagagattagaatatccaatcatattgaaacacaagtactgcagtagtagatgtggctgcttctgattggatgttaagagtatataaggataggtatttcctgcttctgttcatttcgcttccggacttcgtcgagagaacatctctgacttctaaccgtgagtgatgtcgacgcttccaatcgcgtctttagacgaccttactcaattttctactcctgcttatacttatatcctgaaatttccatatgtggggtggaaggctgatgaagttcgtctgcaaagagcactgggcggtattcggggagacgctctcgatgatccatccgtgtacatcgggatgcctggtcccgatagtccggttgagcagacgagttttctcgagacacatggacctgattccagttatcatcttaacctgtcgcattgtgcacatatggctgcctatagcgtattctccgttaaacagggaagagcacctccggtggctagcatttttgtccagagcgagattggcgaacgcgatttgcaccttcatttggtccttggaggacaggggctaaataaatatagcgctaaagcgttccgccatcagctacagtacaaattctgtgaaaatctaatcaccgttctagagaaacatgtaaacgaaggaactacttctgatcctgaaatgtgttcagttcttataaaatgtctatccaaagctaaaaacgaagaacatgcatattgtactattttacaatataaaagcagaagtggggacctctatgcatgcagagtagatccagtagaatttatctgcaactatctacttcgaaaaaaccttaaatactacacctgtatggatccagataaagccacacaacatattgcctattttgatgccacaagtaagacttacgctgtaaccttagctaatggaaaatgggttccaacagactgtagaaagcaatggctaaatatacttcgccacaacgtgatccaaaaaaacgagccaatatttgccggagaaatgtttgatgttttgcctaaggtacctgaatcttcttggaaaattgatatgctttcttctcaatctaaaataactaagagagagactttaatgattgactgtatgaatcgatgtgagcaaaattactggttaacatatgaagaccttgtaaatgggtgcgccgatctcgttgttatgttagaatgtcaatcgggcggaaacaaacttatagaacagatacttagtatggttcatataaagatgacgcaaaaatatactgcgcttagttatattttagcaaaatatgatccaatcccatttacgactgacaataaagtgtggaaattattaactttacagggatataatccttggcaatttggacactggttattatgtgtcctagataaaaaggcgggaaagcagaacacaataaacttttatggtcctgcaagtaccgggaaaaccaatttagccaaagccattgtaaacgctgttcagttatatggatgtgtaaatcaccaaaataagaactttgttttcaatgattgtactgcaaaattaatatgttggtgggaagaatgtatcatgactactgattgggtggaacaagcaaaatgtataatggggggcacacaatttagaatagacagaaaacataaggattcacatctattaccgcaaacaccgttaataatatcaaccaatcataatatatatgaagtcacaggaggcaataccactacacatgttcattctatgccacttcgggagagagttgttcaatttaactttatgaaacaacttgaaagcacgttcggtgaaatagagccaacagacgttgttgcattattacaagtatgttacaaaaaatattcagtttcattgtcagactttcatcgtacttggaacattaaaaaaactccaaatgactttccattgacggttgtctgttcaaatcatacacaggatctaattgttttcgagagtggtctatgcggatcgtgcggaggctattatccactagagacgtggaatgaaaataactgccaaaatatagaagaagaagacataacaggtgagatccttaatcacaatgatatatcctatgaagaattcgaggaatggatcactaacttcgatttttcgctcttagactctccagaaacaccaaacgctaccactccatcaagaaaacgaacaagttcggacgaaaccataaattcgcctccaaaaaaacaacgcaaaacagaacacaaggtactgatcgattggtcctcacaaccatctacttcggccgagcaatatgtctacgagacatatgagcaagagatcaaaagcgaggagccggagtcgcagtccacaggactcacgccgtccgaatggggagagagacttgggatcattccacaggggatggaccaggaaccaatcgtcctccactgtttcgagacaatcgactgggaggaagacaacaccgatgcatgtattcaatgaacataaaagcagaagcaaagaacctcttcctgcgttctgtggcttctactggcacagcactagattagctcggtgtgggactgactggatttttaatgagggaaaacccaaattccaatcagtatgtcatgaaaacaaaataacatgggatcaatgtagagaaatgttatttgaatttaagaaaacaatagatcaaaaatatagaaatattatgtatcatatgggacgaggggggttctgtcaaaaatgttgttactgggatgatgtgtacaccaagcatttggctaatgttaacgatgttctcacacaggatctgtctgacgcagaaatgctttcagctgcaatggaggtagatggctcctccgaatagaaaaccaggtggttgggtcgttcctggatataaatatcttggaccattcaatccactagataatggcactccaataaacaaagttgacaaagcagctcaaaaacacgattttgcatatcaatcgtatattaataaaggtgaaaatccatatttaaacttcaataaagctgattctgattttattgaggatctcaaaaacgattcatcctttgccgggtggctaggcaagtctgcatttagacttaaacgtattttggctccacatctaaaagaaaacactcctcctgctaaaagagtggccggaaacagtagacaagatagggcgcaaaagaggaaactctattttgcgcgttctaacaaaaactctaaacaagctaggatggaaccgcaggaaactgagaacactattgaggctgatgcgggcattgcggggcgtgctgggggtggtggtggacctggtggaggtggatcgggcggtggctccggggtcggagttagtaccggtgggtgggaaggaggaacgctgttcggagataatagagtcatcacagttaacacacgacagtggtatgcacctatatacaacggacatagatacaccaagcttgagggaaccggaaacacattctggaaagggataaaaactccatggggatactttaattttaacgcgtacgactcgcacttttcaccacaagactggcaacgtctcacaaatgagtacagaagatggagaccaaaaaaaatgatggtaaaaatatataacttacaaataaaacaggtagttacactgcagggggacactttatataataatgatcttacagcaggagtacacattttttgtgacggaagtcatcaatatccatattcccagcatccgtgggatgctggaacgatgccagaacttccctataaagtctggttgctggaaaactatggttacttccaattccaaggtgacctaatagacacgagcgtggacggtggttctccagacgttgaaaatgtagaaaaggaaattgcgaaatctgctcctttctacattctcgaaaatgcaaaccatgaggtgttacgtactggggaggaaacaaacttccattttaactttgattgtgggtgggtcaataatgaccgggcatactgcccactacaggcggactttaatccactggttaaaaccagacgctacttcgctacacgaaacaactacaacaactcaggaaaattcgtgtacacgcgatacagtccgtataacaagccatcacagtggatgccaggaccatcgcttggatacattggaaacacacaaagcgcggctactcgggaacaagccctcggaccagtaactgtagtgactgctccacctgggacatcagcttacactgccttcactgaacaacaatcaaaaaccaatcagcagtctgcatctaatgcaacgtggtccggttatgatgtcagtccagtaaactgcgcacgctctggattcgataagataggattagcctatgactctgctccggaaagtgagttggaggagaaaatatctattagagacatcgacaacgacatgagccgatggggtcaagtgttcgtgcaagacggaacaaacaaggaaatatcaaacgataacactggtcaagggggaaacacacgacaaaacatggcagagttaaaaaatgtatggatgttccccaatcaagcatgggattcgacgcccatcagcagggacttcccgatttgggtaaaatcaccaaacacggacaaacatacactattcgatagctcggatggaactctgcctatgtcgcatccgccgggaactatatttgttaaagttgctaaaataccaataccaactcagacaaatacagattcatatttaactctgtatgttaccggtcaggtcacatgcacaatagaatgggaggtcgagcgatttatgaccaagaactggagacccgagtcaaagaacgacgtatcatctttcagagacgccttcctatacacagtgggagcagacggaacttataatacaccagaaaggttcctggaaggaatgccaacaagaagaggcataaacaaaacgctgtaattgatataatctttaccatgtagtagtatacgtcaccactgggtgtgttttagttttattgtatctgattagttcaataaagcatgtaatgcgccttagttatataacattaatgttatataactaaggcgcattacatgctttattgaactaatcagatacaataaaactaaaacacacccagtggtgacgtatactactacatggtaa

SEQ ID NO: 303 - DNA, 5566 bp, Porcine parvovirus 6
  source 1..5566: mol_type = genomic DNA; note = Porcine parvovirus 6 /  Copiparvovirus ungulate 4 - NC_075986
atgtctcagaccttctggacgggtatttgcaggcttttccctgatattgggaagattcctggggtgactcctgagcggtatatttatgctgtaaacgtgagtacccgtaatgggcaaaagtggccgaaagttgggaccgaggggccattggctgcaggtgtcttacagggggaggcccttttccgtgagacccttaaagaggtccggaaggtgtgccggctgccgcaagacccccatcttttctttcaattggagaaagttgattccaaagggggtcttcaccttcatttttgtattagtgttgctgctggcactcctagagatgtgtcttcgatgtttaaagccattgagcgtcgagtttccttttactactttggtgtagagggcttgactttttttactcctcataaaaataagcatggtgcttggaagagtaatgatgagggctttattgtgaattatcttcttaaaaaattgcctttgtctgagtgtgtgtatgcgtggactaatatggatggggtgattggcgatgcctgtctgaatgaagataagcgcagggaattgttgtctgagcgtcaagatcagggagtcattaaagagctcactgctcctacttttaaagctgctacgggtgataaaatgttgagtgtggtggattggatgtgtgataatgatgtgactacggagcgccgatgggaggaaatatcggctgcgtccctgtactctttccttgctaccccagctggcactcatttggctaaacagtgtcttagagctgcgaatcagcgtattgtgagcactaaacctcttggtctgagtctctgtaaatttgccagtgaaaaggagcttcgtgcttttcaaaatggggatcctgagttgtcttcagacaacaataggatctattacttatttgctatgaataattactgccctgatatggccagtatgattttcttttggtggtctatgcgccaaacgggtaagagaaacagtatttggctgtttggacctgctacaaccggtaaaaccaatttagcaagtgctattgcacatactgctgccagttatgggtgtgttaactggaataacgcaaatttcccgtttcaagacattgtgaatgtgcaactgggttggtgggaggaaggaaagatgacagaggatgtggttgaatgtgctaaggcattgctagggggaagtaatgtaagagttgaccgcaaatgtatgcaatctgcggaagtgcaatctcctccttttattatcacatccaatacggatatgtgccttgtttctcaaggcagttacatcagttttgagcaccagcagcctctccaggatagaatgattaaatttgagtttaaccatgttcttcctggcaatttcggcctcatttctgaagatgaagtcgtggccttcttcagaaatggtgcttataatgtgttgaagcatgcgtacatgagaaaggcccagctttttgctctcggtccagcttccttgccatataagccccctacgggtgaattagtgtgtatagaccaagctaagtctccttctccctctgcttctcgccgcagtgtgagaaattggatgacgtgtccccctgatcctgtccaggacgatcccgctgaactggacgagtattttcctccagatactcctccagaggattgtccttgtcctatttctcctgtgagggagtcttgtccctcgccagggccttgccctacccctcctcgcaaaaaacaacggaagagcaagcattgctccttgtctgtctctgcgggtaaagttcctgtggtggttgtgggtgattctgactcagtcccccccgaagaaaaagaaaaagaggaagtttccgtgggggaatcccaggatccacaactgtactgggacctaactctcagtcaatccgacgttcctgtgcctgaagacgagagtacccagtttcctgacgacgctgtggacgcttctgatctcattgctgaacagtagttaaggtatgagccgttctactcaaagagatctttggtctttgttaagggagagacttgaaacgtataaggatcgagttaaatattatggtattttggtgccagaacgtccttctacctttgcatcttattttagtaaagacccacctccagatcctccaactgttaaatttgataaaccctatcaggatgtagatagattctggtttccaacagacgactatactgactggtatgtctggcatggagaggacagacctcctagatttaccgagcattccggtgttcagggttttaaaactaggtgtgagggggggcttcctttaatccccagtgatcccaaattttgccccatacaaaatttttgggatcagttcgctaattttaatgaggggtctccgtccccccagatcggtgagagtgtttcatggagtgatcattttggaagtcccgatccctctcatcatcaggaggtgagggatgctgatgaagtagtttcagagcgacagcaatataaaaataggattgtcaccttattaagaaaagtttattgggctaagcagtggtctgggaaattacaaattaatgttccttccctcgaaagcctttatgagcagatcccctatatgctagcctatatggacgctgataattggcgtcagaatttgttagctgctaaaactctgcgaaccactttggaagcattttcctgtgttccagatccttccacgtgcgatgtcacaatctccacacccctatctggtgaaacggatcccgcctcttttgcaaaatacttatgttcccttgtatgcaacaggtctcaagaaaaagaacaggcgcagacgccttctttgtctccatctaaacaagaagggcagatgtcaagtcctgattctgcatcgatctcccaacctccccccgaaagtcacaaggatagactgcttcctaaaactgatccccttcaggaagcagggccccttcccgctccccccacagctcagaagcctattatctctaagggtgcaggcggtggagggtcgtctggcttcataatccctccaaaacctcctagccccgatcatactaaagatcccccccctcctcctcctccctctccaattcctcctcctacatctgcgcctgacgcagaggagcacgagctagagcgtgctaagcaggagaaacaagaggaagatgagctcatgcaaagaatcaaatcaggagaaggagaaggagaacgaggaggcttcgtcttgccttctcaccactacactggtcctagaaatcctgtcccagctggcaagcctgctgaccccgttgatgaatcttctgcgagacatgacatcaggtatgggcaacgtcttaagcatggagactggccatacctgtgggggaaggacttggataatgctcagcgagatgagattatcaaagctcttcatagtcatgtcaaagtgggaacccaattggcagggaatatagtgaggagtatctggaaggctaaggagctcttaacagaacctgtgtatgagctgttaaagtctattctccctccttcagatttatctaaagttcctcttcctcattcccaacagacagacagaacagaagatccagaaactccaggggagactagaggaactggatcagacagtcctcgatctcctcggccttctggatcaactgaagacgggggaggtccttcttccgagtccagattacctgggactaaagttccagtagacccatctgccaccacgtccgaagcaaagaggcagaggactgaggaggggatggacatatcttcttgctgtccaggggggatttctgcttctggggctgcttcaaataactctggtcttgcttgtgggggtggggggggtactaatttagggacagaatctcttgtatccggctgtcagtttggtaaaaactctgtgatcacttcatcttttagacgatgtcttatttcaccctggcctgataaatactgttgctcttctgctcatgatcttattcctggagtggtctacgagaccccttggtgctattatgatctgaacgtcatctcagcccatttttctccttctgcttggcagaggcttctagaggattatgatgcctttcggcctaaatcccttaaagtgaccatccagtctctagtgtttaaagatgtttgtcaaggagcagaaaaacaaacgaccgttcaggattcccagtcagccaccatcgctatctttgaggataaagactatgactacccctatgtgatgggagggggtcagaaaacagttcccggtcacttgcccggtcagccttacaatcttcccaagtattcttacagaacccttggttccgtcaaagaaagtaatagggccagtatgggcggttcagggtacactttcaaatccaatcaagacacggaattgttcctgcttgaaacacatgatgctactcttattcgaggcgggggtacttttgaacagtactatgaatttccaaacgatcttcctttcgaaaatttgactcagtatccttgggatatccgccgtcaggataaccccctctatcagcagaggatcactgtcatgtcaggttctgacagagatcaggtaggcattctagatggagatttttactctccttttcggttcaaaggtcatgatagacccgccatgtggctgccaggacagaggttgattcagggcaaattcatagatacgcatccaatacccaatacagggaggagtggggttcatcctaatgattttcacacaaggggtgatggtcatggggatacccatagaacacatgaagagaggatttacagtctagatacaggtcttgctgctatgccacgtgccgctcatagacccacccttcagcccggacctaggactctgtctcatgccgtacgcagacccgatggttccaccgtggtcacggctaatgcgtgtgcttacgcttacacccaggagaatcctcatcaggaaccctggagtgatctcaatgtcagacataccatgtataggttagcctatcaacgtcaaaaaggttttcagcaacccggggaccctcttcatattcgaacccatgcttgttatggggacggggatgttaccattccaaaagaagagtccttatggcctactgttctgggtagttgcacagaaaagtcccctgcctgtttagagtcccagatttggtgtaaaacaccaaatgtggacatggtctatggagaacacacaccccctcttgctttatggggtatgcatgctcccccaccccatgtatttctcaggatgcttgctcaagagggtcctcctaatgtcagtacttgcagaccggctcaatctggtcagaccttcatcaatcaatatggtcagtttctcctctgttttaccatggtatgggaagttaagcctagacccaagtccatcaagcagtggaatccacgtccgcccatcagcattcctgttggtcagtctggtcctgctttcattcttgatcaagatggctactaccgtctcccagaacatgtctggtctgccagggaacgtatccgcagcaaacgctag

SEQ ID NO: 304 - DNA, 4424 bp, Tusavirus 1
  source 1..4424: mol_type = genomic DNA; note = Tusavirus 1 / Protoparvovirus incertum 1 - NC_075988
cctgtctaaaaaaggcaaaaaaggggcgggaaacttaagcaatataggcagagacaaactgattgactcattcaaacagtgcaagcgctgctataggtcacgctggcaggtaggatatggataaacggcttaaattgggactactctgctgctattcaacactattgtggggctttctgctgtgcatcctactttggtgcgccttcaatgagcagtacacctgtgtcatctggaaccggtatcatggctcaggcaatgctggctgatgaagttacagaggcagttagttggttaacggagcatgacggagcaactggtctctcttatgtttttaagatcaaccatatcaaattggatacaactggccaattactaacttggaaggactacaccaaggaaccatctgacaacgacttaactgcactggctaaaggagcagaaacatctctggacatcactaacagagacgaaggacaagacgacataccagaagacagcaaaaggtcagtgattattttatgtgctgtagttaaaagagtgctatttgaactgtttaaaactaaagatatagaagccaaagaaattaaatggtttatgcaagcagaatggagtaaagatcaagaatttcatatacatgttttactgtggggagacaaagtaaagcaagttcaaggaaaatggtggcaaaaatttttaaatggatggtggtcgagatttttagtcgcctctttaaaaccagttatcagcacagctgctcgcattcaaataagagagagaatagaaaaagacttatgggtagatgtgctacaatacaaacattcccaaacaagaaaagaatatgctaaattagtagatatctccagcattattgcaaactactttttgagaaaagatgcttggtggctgaacaaaccaagtatctactactgttcttttgactcggactttaaaatagaccaactatctttttcacaacggttggcagtgagcaagctttttttaaaagcgaaacaaacaggtgacatagaagtgagaactgaaactgctcaagatagaaagaggcagcgtgtagaaaccacaaaagaaaaaaccataaaagacatctgtgacatgctttttgctaacagaattattactgcagaagattggatgctttttgatccagactcttatgtgcacatcatgacacaacctagcggagaccaactaattagaaacaccttagagataagcactctgcgtctgtcaaaaactttaactgccttccaactaataaaagaaaagcatacagagccattagagacaattgaagaaacaaaaatctttgaaatatttaaaggcaacaattttaatccttataaatgtattcatgctataatgtgctgcctaaacagacagatgggaaaaagaaacaccatcttattttatggaccagctacaacaggaaaatcactcttagcccaagccttatgctacctagtaggaaatgttggctgctataatccagctaacgtgaactttccttttaatgactgtaccaacaaaaacattatctgggttgaagaagctggaaactttggtcaacaagtaaaccagtttaaagccatttgcagcggacaaactatccgcattgatcagaaaggaaaaggtagcaaatccattgctccaacaccagtcatcatgacaactaatgaggacataactcaagtcggagttggatgtgaaacaaggcctgaacacactcaaccaataagagacagaatgttaggcttcaacttaacaaccaagttaccaggagactttggactcattcccactgaagagtgggctaacatctttgactggatggtgggtcattattatgaacccacattgacatgctacgtgaaacggtggggaagtccacctgtctgggaagaagattggaccagaccagattacaaaggagttgtccacaacagctctctgctaaaccctgctaatggtagggtaaatcctacacaggatccagatcgagtaactccacctgatctagcagatctgctagatgcctgggagaaagacgagctgttagacgacttgcaaccagctgacagctccttggacatctaccaagcctaacttacttggtgagtgagatggcaccagctgctagaccacgaaaaggtcagcaccaaaccttatgggacgggtggggctaaacttaaacaactgactaacctatgcttttttataggttgggtgcctcctggttacaactacctgggaccaggcaacgacttggacgccggagaaccaacaaacaaatctgacgcagctgcaagaaaacacgactttgcttactcagcttacctaaaacaaggcctagacccatactggaactttaacaaagcagacgaaaaatttataagagacactgaaggggcaacagactggggagggagactaggacactggatctttagagctaaaaaacacattttgcctcacctcaaagaacctacactggcaggaagaaaaagacctgcacctgcacatatctttgtaaacctagccaacaaaagaaagaaaggcttaccaactagaaaagaccaacaaaaagacacactggattctaatgcacagcaaccagtcagagaagctgaccaaccagacggtatggcagcctctagctcagacagtggaccttcatcttcaggaggaggtgctcgcgctggtggtgttggtgtgtctactggtgattttgacaatactacgctttgggactttcatgaagatggtacagccacgattacgtgcaactctacaagacttgttcacctcacaagaccagactctctagactataaaatcataccaactcaaaacaacactgcagtacagacagtgggtcatatgatggatgatgacaaccacacccaagtactgacaccatggagcttagtggactgtaatgcttggggagtttggctttcaccacatgactggcaacacataatgaatataggggaagagctagaactacttagtctagagcaagaagtttttaatgtgactctaaaaacagccacagaaacaggacctccagaaagccgtatcaccatgtataataatgacctcactgcagtaatgatgataacaacagacaccaacaatcaactgccatacacacctgcagcaataagatcagaaacacttggtttttatccatggagacctactgtagtgcctagatggagatactactttgattgggacagattcctttctgtcactagcagcagcgaccaatctaccagcatcatcaaccacagctccacacaatctgcaataggtcaattttttgttattgagacgcagcttccaattgctctgctacgaactggagactcttatgctacaggaggatacaaatttgactgcaacaaagttaacctgggcagacattggcaaactaccagatcactaggacttcctccaaaaatagagcctccaacatctgaatctgcactgggaacaatcaatcaaaatgccagacttggttggagatggggcataaatgatgtccatgaaacaaatgttgtcagaccttgcacagccggctataaccatccagaatggttttacacacacacacttgaaggaccagctatagatccagcaccaccaacatccataccaagcaactggggaggaggaacaccaccagacaccagagcatcttctcacaaccaacaaagaatcacatacaactacaaccatggaaacaaagatgaaaacctcaacaacttttccctaaatccaaacattgaacttggaagcataatcaaccaaggaaactttctctcctatgaaggtaacgggcaacaaatcaacacaactgcaggagttggtaagaatggtgaaactgcaacaagtgatccaaacctagtcagatacatgcccaacacatacggcgtgtacactgcagtagaccaccaaggacctgtttacccacatggtcaaatatgggacaaacagatccacactgataaaaaaccagaactacactgcctagctccatttacttgtaaaaacaaccctccaggacaaatgtttgttagaattgctccaaatctcacagacacatttaacgccacaccaaccttctctgaaatcatcacatatgcagacttttggtggaaagggacactgaaaatgaaaattaagcttagacctcctcaccaatggaatatagccactgtattaggagccgctgttaacataggagacgctgcccgctttgttcccaatagacttggtcagttagaattccctgtaatcaatggaagaattgtaccctctactgtttactaatcacttggtcaataaaattgcgttgtatccatctctgactccagactcttttctataaagcaaccaac

SEQ ID NO: 305 - DNA, 5161 bp, Dromedary camel bocaparvovirus 1
  source 1..5161: mol_type = genomic DNA; note = Dromedary camel bocaparvovirus 1 / Bocaparvovirus ungulate 7 - NC_075998
ctgcctgcttaactacatacatagtagctctgctctaacgaaaacccgcttggaacgaaactcgaaagagaatttctatatggaagaggttatcgccttgtgtgtagctacatacagtctcgggatcatcatagcagtggtcttcataatcatctacctaaacaatagacctgacaacgaaatagaggacattgaatcagggttctttggcaggaggaggagagaggactaaacatgtcctttccaactaccgaccacgaatggatcgagaaatggtacggaggaatcaccggcttcaaagagccatgctacacctacgtcctcaagataaacgtgaaagaatggagagcatgggagaagcacatgatggacatcttcagcaaggggacctacggggtagtagccactatggtagacgaggaacatgaaaaagtcctggcggacgcgagctacgactggcacgcacagctgagcatgcacctgacgggatcgcatggattaggctactatctgtgcgaggcggcacacgaagcggcacgaaagctcatgtcactcaaacaacagaacatgactccggagtttagcatcttctgtcaggcagagatgggagaaacagacctgcacgtgcacgtggtgctaggaggaagcgggctgaccaagttcaacgccaaaaagaacatggtctatatgggtagagaattctatagatggctctatgataaattcacaatctacgaagagatgcacgacactagcaatcctcaatatacgattgcaggctactggcggagagcgctcgatcaactgaagagacacgacccggaaggactagtcgacatcctgacctatagagataggcacggcaacgagcacgctcagagagtagacgctaagagcttcatcaccaactatctgataccgaaaaacagaaaactctacgactttatgacaacactcatgtgcacaccagaaagcgctctattcgatacaaccaagacatacatgcactctaccatcgatcacaatccaatcactcactatctacgcaaagagctacacgacaagctagtgggcaactcggaagaggaaacggaagaaccgccatttaagatggcgagatggggagaacttccaaaggtaacagaaaatagactagagagcaagcagattgtaaataagcctcagaaagtggggaaaaagaccaatctcatgctagacacactacaaaagtgcgaggagaaacacatctgcacaatagaggagatgatcttgttgcatcccgagattgtgctcatgtacgagggcctaccgggaggcaacaagacgctcgagagcatcatagagatgtacagagtcaaggtgaccagaacctatacggctctgggatacattgaaaagatgtactcgcagtttgacatagtcagaccagacaacaagatagtcagactgcttaacattcaaaattacaactgctggcaggcgggacattggatctgtaccgtcctgcagaaaagagcgggaaaacaaaacaccatcagcttcttcggaccagcaagcacaggtaagaccaatctggctaaagccatagcagaagccgtcaagctctacggctgcgtcaatcacttgaacaagaactttgtgttcaatgattgtcagaacaagctgctctgctggtgggaagaatgcgtgatgcacaacgattgggtggaaccggctaaatgcctgatggggggaaccaaattcagagtagacagaaaacacaaagactcagcagaacagccacagacacctctcatcattagcaccaatcacgacatttacaaagtagtgggaggcaacacagtcagtatggtacacgagaaacccatcaaagacagggtctgtgagtttgatttcatgaaagcgttgccacaagattttggagagatttctccactagaggtcgccgaatggctcctctgctgtaaatctgaatttgagtgtacgctcaatggctttaaaaagcagtggggaatagaaaaagttcccaacaagtttccgatgcagcgtctatgtgctggtcattcgcaggattggacgctgtactctaacgggccttgccacgcttgcggtgggtatctgccttatacaactactccggacggtgattgggtggaacaagagtccgatcagggtaagtactcctcacggggacggccttcgcggggtacgaagggaatcccggtctcatgtctcttgttttacagaaacagacgggattccaactcagtccgacaaccgggaatccgctgtttatacttcgtctcccgcacaagagggcgtccttcaagaaactcctgaagctagcgcctcttccggtacgtccgatcatgaacaggaacagctggaagaagtcatctcggtctccagtacggaggaagacggaggagaggccgaagccctacgggcggccgaacagtccttggtggaggaagtcctcgccagtggatcacaagcaatatggcaatccgtcaaccagctcgtcgacaagatactcgaccaaggggagggagggagacagggagatatcgacttctggctcgcctgttacgagcagccagaggagccgcaggaaggctaagacaactcctgccttcgtgttttcagaacacagggcacagacgagctgcgagttgggattttgcggattttactggcactctactagattggcaaaattggggacaaacgcaatctttgattggggtaaaaaacaatttcaatcagcagctgtggatggtaaaattggatgggataatctcagagaaatactctttgggtacaaacgactcctagatcagccttatagaaacatgatgtggcactttagaatgggggagagatgtgaaaaatgtgaatattgggatgaggtctaccagaaacacttggcacacgtagattcaaactgtgattcacctatggacacttcttctcctacagataaaaacacagaattgacagatcaagaaatgctggaagcagttgatgcctccagctaaacagagagggcaatttagaggcatcctctttcctgggtacaattatttgggtccatttaatcctcttgataacggtgaacctgtcaataaagccgacgaggccgcaaagcgtcacgatcttgcctataatcagtatttgaataaaggtctaaacccgtatttgaaattcaataaagctgatcaacagttgattgacgatttgtctgacgactcttctttgggcgggaaatttgcgcgcggagtgttctcgatcaagagagcactagcgccatctctagacgagaaacagctggcgcccggtcgctcagccgagcagaaacaagcacgaaagttgtactttgcccgtaacaataagggcgccaaaagacaacgtctcaatccgcccactgacaaacaaaccaagaaacctgataatcctaatatggaaactgaacagcctatggaagatgaatcagctcctcaggaggcagctgcaggaggcagagcaggcgctggtggaggccctgcaaatgctggtacaggaggtgttggtatgtccaccggccaatggatcggaggcaccatcatcacaccaaacaaaatcgtcaccagaaacaccagacaatggtggtgcaacattaaaaacgaacacagatacaaaagaatcacaaacgaaagcggagctagactctacggattcagcacgccatggtcctacttcaacttcaaccaatacaacggccatttctctcccaaagaatggcagacgctactcaatgtagcagaaaaattcagaccggtcagaatgaccgtcaaaatctacaacatacagatcaaacagattgtcaataacctagcatcgggagacacgctctaccaaaatgatctcacagcgggtctccacatcttttgcgacggagaacacgcatttccatacactcaaaatccatgggacagaggaaccatgccagaactacccacagaaacatgggaactccaacaatacgcatacgtcacctgtccagtagaagccattgacgacgccggaacaaacgcatacgaaaacgaccttctcagacaagaaccactctacttcctagaacaagcagaccacatgatcgtcagaacaggagaagcggttcaattccatcatgaattcgactgcggatgggtatacaacacgagaagcgcacaaacaccagcaaacatgagcttcaatccgctggtgctatccaaagaagtatacaaattcacaaccagcgccaccacagaacaagcagtactatcaaaagcaagacaaaagaccggatattggggaccgggaccgggacaaaatcatcaagcaaactcaagactaggaaatgacccaacaagcgtagtagcgcctcaactatcattctacgacggatacagacaaacaaatgacagtggaggaaacaactcccttttggaaagcggaatcaacatcggaacagcagtaggatcacgacctccaaaaacgctcgcagactatatatactactgtccaagagacgatcctacagtagaaaacccaatagacatacaaccagtcaacacgggaacgagaaacaacgaccattacaccacacaaggaaacggaaacacattcacaaacaacaatccaaactggatgctaccaaaccaagcatgggattcaaccaacatcacaagatacaatccaatttgggtcaaaacaccaagagtcgacagaatgaccatgatagataccagagacggaacgctaccaatggcacatccgcctggaaccatctacatgaaactagccaacataccggtaccgacagacgcaatctcctacctgaacgtctatgccacaggaaacgtctcagtagaaattgaatgggaatacacaccacacttcaacaagaattggagaccagaatacagaatcacatccgaaaacatggaaaattgggcctacaaggtagacaccaacggaggataccagtggcctcaacacttcaacgacaccatgacaacaagatacggcatggagaaagtcctataagcatgcgcagaagaaacggaggagggagggggaggaaatgcccttgtaatacatgacctttgataccaataaaaataaacgcatattccatatt

SEQ ID NO: 306 - DNA, 5308 bp, Equine parvovirus H
  source 1..5308: mol_type = genomic DNA; note = Equine parvovirus H - NC_076001
atggagaccttttggtacggggtggtaaatgccttcgccgatccggtgaagagcctcccagggtgcacctatgaggcacctttctttaatgtggctctcacttctcgttctaatcagatgtgggatacaatacagtcgtcgccgtatgccaattgcgcgagactcggcgaatggctgttccaactgctccggcgccagatcagcctgcatcatcggcaggccacggaaccggccctgttcctgcaagccgagarggccgaaggggacggcggtcggctccatatccactacgtcgtgagcacgagcctagggaatccccgtgagtgccgcgcgctctttaatgcggtggaagtagagctcagcgctacgctgcttcgggctgggctgcagttctttcttccccgcaagaataaaaatggcggctggcagtcatgcaacgaggacttcattgtgtcctatctgttgcctaaacagcctccacacaatgccrtctacgcctggacaaatatgtctgggctggttggtgacgcctgtctaaataaacaagtgcgcgcgactctcaagaaggagagaccctcgacatcaggcagcataggccccatccatcgtgctgtgcaaggcgacaagttccgcgacctcgtggaccactgcatcgaaaacttctgtttcaatgatgaagacctaagagatcagttcccggaatgctggttcagctttgcctgcacaacaacggggttaatgcaattaaaacaagccttcaaagtggtcgagagtgaactaccacgtaaatgttctgccggcctagccattgtgcggtgcttaaagctggacgacgtcaggagaagagcgcaacaaatgcagcggttcgaacccgcaaacaacaaagtctgccaactgctaaccttacaaggctacgattggcaagaagcttcctgtctattctgggcttggagtaccaaacagacggggaaacgtaatgctatctggttaacaggagaacccaccacggggaagaccctcctggcctcggctatcgccaatgcggtgaaacactatggctgtgtgaactggactaacgaaaatttcccgttcaatgacattcccgggaagttactggcctggtgggaggagggagctatgtccagtaaagtggttgaatccgctaaagcactgatgagtggcgcgagcatccgcatcgatcgcaaaaacaacgacagcacattatgtcgtcctcccccgtttatcatcacttcgaatggtgatatcaccgtcgtcacggccggaaatgtcttagacttcagccaccagcaagcattagaagaccggatgtttaagtttacatttgaaaatcgcctacaaccagactttggtatcatctctaccaccgacgtccaagacttcttcctcatggggtatcgattgctcaacgtcacgcaccctgacaactcttgcctcaagcaaggggtccggtatgctcctcacgtcattccgaaacgttatttagctgagttttacgagaagtctgaccccatagaagatgctgaggctgctgagccactggactctccgccttctaaacgcgtacggtttgctgagacagcgacgatcgctcctaccgacgtctccaacacccacccaagagcggaaacgtcgacgtccgcagctggtgcgaccaccgaaacgacgacgtctgcgatagccgacgaggaagatttcagcgaccttctcgagtacctggaaacgtgtggccaggcgctagaagccgaggatcaagaaccctgaaacgtaagttttcacaccatgggtaacgttagcgggcacttaaaagaacagcgacgggcggacaggaaaatcttctataaagatatgccgccatttgaaaaggccaccgctcaggatttctctgactattatgtttctgacggaatgccttttcagactttgtatgataattacgatgtcaccagatatcgttggttcatgtttaagaccgaactagctaaaaggcttgtagagttacaaggacaaaaacttttcgcagatcaagctcgtaatacgctagccgcgttgaacgatgataaatttcccgaggggcctgaaggcgattggacagctgtccaaaatgtagcctttggtctgaaagacgtgggtaatgtgaaaaacccagtgaaggctatgttagctaaagccctgcaagatcgcttcagtcttcgaggcccaaactttgaaaacggcttgtacgttgctcctgacctgaaatggatgaatttcaaaatagagagcgatgaggagrtcgcagaacgcaaggcaaaagacttagctaaaaaagagttaagaaaagaaaacgaaatgttagtgaagcttgaacagtctgttatgtctaaagatgctgctggactcctcttcccgggaactcattatcttggtcctggcaatcctgtcccgaatggccctcctgttgataagctggacgcggcggcagctaaacacgatatccggtacgacgcgatgcttaaacatggcgatatcccgtatttaaaacataactgggcggatgaagctatgtcgagggacttagaaaaagatgagccgaagtcttgggtgggcaacgccgcgcgaggtttatggcaagttaagaaaacaaccacaaaagttgttgcgcctcttcttggtcctgtattgccagtaaaacctatcccaagtgaatcgtcaaaagtgtcaaaagccgaggccgacagcaccagtaacagtactttgtcttccccgcagaaaagcagtcgggcatccgtcgaaaaagggacaccgacatcgaaagaggccaaatcgaagaagaagaaacgactccgtctcaaagtctccagcgaatcatctggaccggtcaaccataacatggcttcctcgggcaacgggaatggattagactcagacatgggagatggggggggaggggaacatgtagataaagaagcggcgggaggaggaggaggggcgcccgaatgtgggggaacctggtggggagggagtaaagtcaatggacaccacttgaccacctttcaaacacgtcgctgcattctgagtccgtggcccgatcagtatcgtacccagtataattatagcttagtaccagaggtagtgcacatcacgccatggagttatatagatttaaattctttatcagctcacttttcgccgcatgatttctatcaaatgatcgagaatgcagatgctttccgaccccgatgcctgacagtgaagattcatgagctagtctttaaagatgtaggaaagaaggaaagcaattcggaaactaccgtagcggattcgggatctgcttttttgtcattaattaacgatagcaactatgactttccatatgtttctggggcggggcaggacacggtcccaggacatttaccaggacaaccttataatctacccttatacgcttacacaactgtcggcgtggtagggacgatctgtgagaaaagccgttcagcgaaaacgttacccactcagaatagtgagttttacctgctcgagaatcaccctgcaaaactcttacattccgggcaatgttgggaacatacctaccacttccctgagctaccatttgagaagttaactcaatacgtatgggatacccgtagacagtataatcccattcaaactcagcgcttcgtgcttttgaaacggcctgctggccaagagacgagcactgatgagaccgcgcaaaaagcctggaataacaagttacaagatcagtttaataagcatgctttaccgtatgatcaagagaagatgcccagtcagtggttacagggaccccggcatgcagatggagatctcatcatcattcatgattgggatcgaatgaaaagtctcgtaaatcaagcaggggattgtttgagaggggtacaagctcctcaacccaaaaaggctcgtctcacgggggagccacctctaattgttactcgggatacttttaagcatctgacagtatatagtcgatcagaaaccttacagcccggtccccagactcaacaagctgcagagattactcccgatggtactaccatcatttccgccaacacagtgggggtaatagaaaaggcccatgagaaaatgttaaatcccggggctgtggagggatacatgcgccttccccttctgcagaaaatcgggcatcaagaccccaccgatccaagacacatccgcgaggtcgagtaccccaaaaccgctgaagacggttgggggaatgttggtacttcgactacaaaagaggtatcctatgctttgatgccgggccaagtgttagaaaaaccttctggtcatttagagtctcaaatttggacgaaaatccccaataccgatgatatgacaaaacccactatccctctattgtccttatgggccatgcataatccaccaccacaagtgttcctgcgaatgtttcctcaatttgggccccccggtagtaaaaaattctccgcgtcggtacagacaccaacattcctgaaccaatactgtcagttccttctaagttacagtatagagtgggaactcataccacgatcccatcgtaaagcacagtggaatccagaacccaatgtcgccatgccaacgaatattaagggacccccgttccaattgtcgggcagcaacgacgagtatcacttgcccacccacctatccatgatgcgccaacgcgctcgtaccaaacggtaatgcaataaaatcgtgttggaccgctaatctccttggctggtggctatgacgcgacaccttacataacaccggaagtgacgtcacttccggtgttatgtaaggtgtcgcgtcatagccaccagccaaggagattagcggtccaacacgattttattgcattaccgtttggtacgagcgcgttggcgcatcatggataggtgggtgggcaagtgatactcgtcgttgctgcccgacaattggaacgggggtcccttaatattcgttggcatggcgacattgggttctggattccactgtgctttacgatgggatcgtggtacccccccaacctacggcgagcggtgattactagcagcacgctcgggggtctccaatggctccagcggggctccgagtggccggaggagcagcccaccccgtccccacggcagcggctttacctgcacacatcacgatgcgggattcaatattgccgcgtcctcacagaaggcgcgctggcggcggagcagatgttacatcacgtcaacggttgtgagcccctatttataggtgagtttgaaccagggtttctatcactgcagtc

SEQ ID NO: 307 - DNA, 4619 bp, Fox parvovirus
  source 1..4619: mol_type = genomic DNA; note = Fox parvovirus /Protoparvovirus carnivoran 4 - NC_076133
cgactgaccatgttcacgcttaagacacgtcatacgcgcgcaaaaaacgcgggaaccgttattgggtggagcaaagaagagcgaaactaactaagctttaccatgtaaggtaacaaaaacggcgggcttgaagtagatgctatataaaggggtggcattaccggatcagagcacttctgctatcatcaagacagctgaagacatggcttataaccagtattcagacgacgtgctgaattgctatcagtacatcaaagataatgaaacaaagccagcattaagctttgttttcaaaacccaacaattgcagatcaatggaaaagacataacatggaaggactatgacaaaccaatcaaggatgaagagatgcttagtctggaaagagcagctcaaacagcagcagatgcagcctcagatgacatggattggcaagatgctatggatgatttgtctaaaaggttagtgtgtaaatttgatgctatggttaagaaaaccctgtttgctgcgattcttagcaagggtattcaaccaagcaaatgttactggtttatccagcatgaatttggccgggatcagggatatcattgtcatgtgttgcttggtgcagatggctttaaaaatacaatgggaaaatggattaggacagctttaaataccgaatggggaaggttactagtgcaacattgttcaaccaacctaaatccagctgaaaagattaagctgagagagatcatagaaagtagccaatgggtttcagttttaacatacaaacataagcagaccagaaaggagtacacaaaaatggtcagttttggtgagatgattgcaatctattttttaggcaagaaaaaggcagttggcagtaacatatatggctactgtctttcatctgatgacaaatttgtgacgcaatttttgaaagaagcagacagacagttggttaataaaatgtacctagaagaaatcaagaaaccagtagaagcagttgctgtttcagcacaagaaaaaaagacaggaagagtaatgacacaaaaagagcagtccattaaatggacaattaatgacctagtaagcaagagagtagtcagcccagaagactggatgatgaatgcaccagacagttatattcaattcatggctcaaccaggaggagaaactttgctgaaaaacacaatagacatttgtactcttacattaagcagaaccaagtcagcttttgaattagttgaagaaaaagcaagcaaaactaagttactaacatacagtattttagaaagcaggacagccagaatttttatgggacatggatggaatccaataaaagtgatgcatgcaatgtgctgtgttttaaatagacaaggaggaaaaaggaacagcatattgctacatggaccagcaagcacaggaaagtccattattgcacaagccatagctcaggcagttggaaatgttggttgctataatgcagcaaatgtaaacttcccttttaatgattgcacaaacaagaacctgatttgggtggaagaggcgggtaactttggaatacaagttaaccaatttaaagccatttgctcaggccagacaattagaattgatcaaaaaggcaaaggatccaagcaaattgaaccaactcctgtcattttaaccacaaatgaaaacatcactgtggttcgcataggctgcgaagaaagacctgagcatactcagccaattaaagacagattgcttaatattcatttggtgaatactttgtctggtgactttggactaattgacagagaagaatggccattgatttgtgcttggttggtaaaacatggttacttaccaacaatggcagaatatgtgaaaaaatggggaaatgttcctgattggtcagaagactggagcaaaccacccctggctgatataaatctaggttctctgagctcagcctcaactcgggcgaacactccatttcgaatcaattcaccaagccaactgctgaacgacggagagaactattctccggatgcggccgctgtggattcatatcttttagcaaatgctggcggactgacaacaaaccagacagcagaaagtgcagccgctgcggagaaccgctgggaaacaccagcacaagaagaactaacaacctggtctactatccaagcagagctggaacagctctttgaagacacaagacagtagacaggtacgatggcacctccagccaaaagagcaagaagaggtcagtgggttggtggctggaaggtggggaagcaaaaaaacataggcattaatatattttcttatgttttttaggttgggtaccgcctggctataagtacctgggaccaggaaatgctttagaccaaggtgaaccaaccaatccaagcgatgcagctgccaaagagcatgacgaagcttacagcaaatatttagagagcggcaaaaatccttatctatattataatccagcagacgccacttttattgataagaccaaagacgccaaagactggggtggacgccttggacattacttcttcagagtcaaaagagcaattgcaccttccttgccagaccaaccaggtccgtcttctggaaaaaggcgaaaaccgcctgcacatattttcataaatagagcaaggaaacgcaaaaccaagccagactggagaaccagggacaagatgttcaacaagactctggacagtctgctaatgcaatccggagcttccatatctggaggaggctcaagcggtggtggtggtggtggcgggtctcgcggcggcggtgtgggcgtgtcgacgggcagctaccttaatacaacgcaatttaaatatgttggaaatggtatggtggagatcacagcccattcaaccagactcgtacatctaaatatgcctgattctgaaaaatacagagccgtggtggtcaacaacaacgatgtcactgctggtgctgctgggaaaggcaacatggtcaaagacgatgctcactaccagatggttactccgtggagcttggtggattgcaacgcatggggagtttggtttaatcctggagactggcaacttattgttaaccaattggaatcacttgaattggttagccttgagcaagatgtgtttaatgttgtgcttaagacagttactcagcaatcttcggacccaaatgcgatcaaactctataacaatgacctcactgcaagcctgctggttgctcttgacagcaacaacgtattgccattcactccagctgctatacgaagcgagacattaggcttcctgccatggcaaccaaccatcccaactcaatggagatactaccttcatgctgaacaccaagtggtgccatcatattcaacacaaaccaacaatcccacacaaaccttcaacagaggagctgaaagcgtgcagttttatccagttgaaagtttggtgccaattgaaatgctgagaactggagatgaattcagcacaggtacctactattttgactgtgatccaataccaatgacctattcatggcaaacaaacaggtcacttggtttgcctccaaagattgaaaatatgccaagtaccaccacagaaaatggaaccttgctggctcaagaccagagacttgggatgacacaagacctacaaaatctaataactgaagtcaacatcatcagaccagtggacattggttatgatacaccatggaggctatattccagtggccagcagggggcatttagagctccagtattgcctgcagacacagtaaccactgatgtgacacctgaaagtggctccataagaatgtcctatggaggacagcatggaacagccaatccaacaacaattgacagatacaatatcgtagcagaaaaccaccaaggaagaagagcagccacagaatggcttcaaacagcaccttccaaccaagcctttgctgctgcaacaagacaagaagtcttacttcaaggagatcgactagtggctgatgttcaagcaggaaacagtgatgttggtttgctacaagcagtaagtacatatgggccatttacagcatttaatggcatccaaccaacatatccacaaggacaaatttgggacaaacaagtagggactcaatacaaaccaagactgcaccttaatgcaccatttgtgtgcaaaaacaatgcaccaggacagctactagtaaaaattgcacctaatctaacagaagaattttcaccaaccagtgcaacctttaacagaatcgtgacatattctgatttttggtggcgagggactttaacactcagaggaaaactaagatccaaccatcaatggaacaccattccacaatggagcctgggagcaaatgaactaagaccaacaataccaaataaccaaggcgaacatgtgattccagtatgtgttggcggctggaaaccaagaaagatctattaatcataaaatgcttaaattgtttgcttggtatgcttattagatagtttaagggtgggaaacattatgaatttttgagtgggaggtttctatatgctatatccagctaatactgggatttcttgcttctatattagttagcaataaacaataaagatggtagtggtaggtctatcctttgcttggctttaccctgg

SEQ ID NO: 308 - DNA, 4219 bp, Canine protoparvovirus
  source 1..4219: mol_type = genomic DNA; note = Canine protoparvovirus - NC_076185
atggctacatctacattctctgacaaagaagtggctgcaattaattggtgcaagcaacacctggaaaaaactggactaagctttgtgctgaagatacatgatctccaattcaggcctgtggaaaacaaggcagtcaattacacatggagagactacagaaaaccatccaaagatcctgacatcctagaagtctggaaactagaccaacaaaccgtgagtaatcgcgatccagaaccgggttggaaagcagacattcatagagagccatatctacaggccttaaacctaactagcttagttaaaaaaattctttttgactacttcaaaaataaaagcattgaacctacagaagttaattggttcatacaatctgaactaggcaaagacagtggcttacattttcatgttttactacaatctgaaaaaattccacaagcctcaggaaaatggatacaaaaattctttgcagaaaaatggggactgttactaactggtgcagtgcctttacataaagaccaggcacaaacattctttaaccaaaccagattcagagaaactgtagaaaacaatgaatgggtgcaagtgctatgctacactcatcctcaaacaaaaaaaaagtatgtcaagccaatattttatactgaaatgattgtcagatactttctaaccaagcaaccatgcatgtctcataatggaactggctactgctacacttctgacagtggattcatctttggagacatgaacagtgacagcagaaaaaaggttgctaaacacattcaggatatgctagacaggatgaaggaaaccacagtaacagacacttcaccacaagaaaaaaaaaagaaaagagtcgagtctcaaaaagaaacaacaattaaagagactatccaaactttatctaacaaaagactgcacacacaagaaaaatggatgctaggagatcctgactcttacattgctcaggttgctaatccaggtggtgaaactatcatcaaagctgcactcgatatagtcactctcaaaatgtcagttgaaaaaactgcttttgacttaatactagaaaaccaaacaaaggcctctaaaactgctaaacatacaaaagcctggaaaatcattaaaaagaatggctacaatccatacaaagtataccatgcaatcatctgctgcctgaacaaacagatgggcaaaagaaacacaatcctattatgtggaccagcaagcacaggaaaaagtctgcttgctcaaaaaatatgtcatctggttggtaatgttggttgttacaatgctgcaaatgtgaactttcctttcaatgactgtagcaacaaaaacatcatctgggtagaagaagctggaaactttggtactcaagtaaaccaattcaaaacaatcatgagtggacaggcaatcagacttgatcaaaaaggcaaaggcagcaaaactatcgaaccaactccagtaataatgaccacaaatgaggacattacaaaagtcatagttggttcagagacaaaacctgaacataagcaaccaatcatggacagatgtgtcagaattgaactcaaaaatagactagatggtgactttggattactagaagattgggaaattccatgcattttcagaaaacttttaagcaaaggatttgaaccaacactagcaagctactgtaaacggtggggtgcaccacctacttggcatgagaattggaatactaaaccaattaattgtgacgttgatgaaaatgaagaggaggagccagaaccacacgaaacaaattcaaaagaacctgttgaaattacagacacagacttcgacgagctcataaaaggtttggaggaagatttcgctgccatggaagaccaggaacttggctatggccaggaactcctaggtacaccagatgcctccgactaatcgaccacgaaaaggtcagtactttttttacttctctatgtgggttgtgggtaaatgttctcacggtttgtcacgtttgctgttactatatgaaactaactgcacatcaaagctcatttcagccatggaactgctactgttaatattaatatgtggactcatactcagtctactcttggactttctctatcttttaggttgggttcctcctggctacaattacttgggaccaggtaacactgacttctccatagaagaaaccaaccaatcagataaagctgctaaagctcatgatctggaatacaacaaacttcttcaaaaaggacaaaatccatacatctacttcaaccacgcagacgaggacttcatccaagcaaccaaccaagcctcagactggggaggcaaatttggtaacttcatcttcaaagcgaaaaaggcaatcgctccagaactggggcctccaaagaaaaaaagtaaagaagaaccaggaccatcatattcctggagaaacatcaaaccgggcaccaaaagaggtaagccctttcatatctttgtaaatagagccagagctgccaaaaaacaaagactagaacaaatgtcagatcaggcagccgaagatggacaacagcagcctgcagttggggcagctggtggacacgcttcgggaggtggaggtggaggtggaagcggtgttgggcacagtaccggcgcttttaataaccgtactgagttccattatcataatggtgaagttactattgtatgtcacgcaacaagacaggtccatcttaacatgcctgggtcggaagagtacttactctaccaaacagaccacggacctagattccctaaaccgggagaccaacaattacagggcagagacactataaatgactcttaccatgcaaaagtagagacaccatggtcactactacatgccaactgttggggagtctggtttaatccagcagacttccaacacatgacagcaatctgcaatgaacttgaaataattggttttgaacaagaaatagacaacattgtcattaaaactgttaccaaacaaggcacaggacaggaagaaacaacacaatacaacaatgacctaactgctcttttagaaatagcagaagacaaaagtaacctactaccttgggcttcagacaatatgtacatagactctctaggctatgtaccatggagaccatgtaaactacccagatattgctaccatgttaatttctggaactcaatagacataagagcaggacctcaaggaaaccagtggaaccaagtccacaaaggcattaaatttgatgacatacaattcatcacagtagaaaactgtgtaccaatcgaactgctcagaacaggtgacaaatgggactctggcccatacaaatttatctgcaaaccaactcaattagaataccactggcaatctaacagacatatgggatcctgccatccaagcactcacccaaatgcaatcggaggtgagggacaaaactttgaaatggtcaacacttggcaatggggagacagagatacaccaggagctgcagcaaccaaagtagacaacttccacataggttaccaatggcctgaatggcacttccactacagcagtggtggcccgtgtgtcaatccaggtcaaccatctagcatgagtccgtggctaacaccacaagtcactagactcaccactggagcatcagaaaaagcagtttttgattatgcacatggagaaatgtctccaaatgaaaaagacaagtggtggcaaggaaaccaacaaatgacaggacaaacagactacactccaaaaaatccacaccaggaacaactatctaatgctgtaagctcagcagcagcattctccaccggaacataccacaacacattcggaccattcactgcctttgacgatgtcggtgcacaatatccatggggcgccatctggggaaaagaaccaggtactacacacaaacccatggaatccgctcatgcaccattcatgtgccaaaaaggacctcctggacaaatcctcgtcaaactcgctgccaactacactgacaccgtcgacaacaatggaaacagctccagaattgtaacctacgcaacattctggtggtctgggacactagtattcaaaggtaaactacgcacaccgagacaatggaatccaatgaactttcctaatatacctgctcataaacaaatgaatacatttgtacctaatgaaattggtcagtttgaattgccttatatgcctggtagagctatgcctaatattactctataa

SEQ ID NO: 309 - DNA, 5155 bp, Vicugna pacos bocaparvovirus
  source 1..5155: mol_type = genomic DNA; note = Vicugna pacos bocaparvovirus / Bocaparvovirus ungulate 9 - NC_076293
gggaggagtcggaccgcctattcgggcacagccaatgacagtaaaggtcaagaatgacgctggcgaggctatataagaaggagcacaggcactcaggcacattctgatctcggctgctgcggagaccacatctctcggtgagtcactcactagcgccacctagaggatgtcttattcgggggtctatcaagctgatggaaatgtctatgggctaacaagcaatgagatgatcttcatcactgtcttcatggctattataggccagatattgctgatttggtggtggtgcagaaatatagtctcacgccgagagagagaagatctcgaggcatatctagttgagactatgtctttcaacaggtgcaggagggaactcgactctgtcgagatcataaaggaggactgagaacatgtccttcccaactaccgatcaagaatggctagaacgatggtacggtgaaatctcaggctttaaagatccagcctacacgtacatcttgaagtggccagtgctagaatggaaacattgggagagagagactctggacatcttcagtccgggaacagctagcatagtggaggcgatggtggacgaagagcagagcagagtcctggaagatgccgcgtacgattggcatcagagcctggccatggctatcaagggagagtcaactctaggctatcacttgtgtgttgccgcgtatgaagcttgcagaaagctgatgtccatgaagcagcaacaacacaatccagatttcagttgcctcgttcaggccgagatcggtgaagagaatctacacgttcatatagtgctaggaggtagcggcctcactaaattcaatgctaagaagaaccaagtctacatagccagagaatggtttaaacatctctacgctaaattcagactctttgaagaatccaactttacaaagaatgtccagtatcacatcgctggctacatcagtcgagctctcgatcagctcaagagacacgacgtctctggtctctgtgagattctcacctacagagacagacacggagaagaacacgcacagaggatagatccgagatcattcattcaaaattacatcctgccaaaaaatagaaaatgcttcagctacatgagctatcagatgtgcacgatagagctggctagcttcgacaccaacaagacctacatctacactcagctcaatgactatccaatcacacactatctgagaaaggaactctacaagaaactgatcaacaacgattcagctgagacgggtgaacctccattcaaaatggccagatgggaagaactgcctaaggtaacagacaatcagttagaacagaaaacaatcatcaacaaaccacagagagtaggcaggaagaccaatctcatgctagatacgctccaacgatgcgaagagaactttatctgcacgctggaggagatggtcttgtctcatcctgaaattgtcttgatgtacgaagggatgccaggaggcaacaaagccttagagaatatcctagagatgtacaagatcaaagtcacgaggagccacacggctctctcgtttctagaatctatgcacatcgggtctgacagcatcaatacagacaacaaggcagtcagactctttaattatcagggctacaacgctatgcaggcaggacactggatatgcacagtcttagacaaaaaggcaggcaagcaaaataccatctgcttctttggaccggctagtacaggcaagaccaatatagctaaagccgtagcagaagcagtcaaactctacggctgcgttaatcatctcaataagaattttgtctttaacgattgtcagaacaaactactagcctggtgggaggagtgcgtgatgagtaacgactgggtagaaccagctaaatgtctgatgggaggcactaaattcagagtcgatagaaaacacaaagactctgcagaacaacctcagacaccgttgctcatcagcaccaatcacaacatctacactgtagttggaggcaacgcggtcacgagcgttcacgagaagccaatcagagacagggtctgtcagtttgatttcatgaaagcgcttcctcaagactttggagaaatcaccgttaatgagattgccgaatggctcctctgctgcagagcagagtttgaatgcactcttaacggatttcgccgaagatggaagctagacaaaatacccaatagatttccattaggtgaattgtgttctggtcacacacaggattggacgctgtactctcacgggccttgctacgcttgcggtggctatctgcctcatacaaattctccggacggtgactggaatcggcaggaagagtccgatcagggtaaggagtctagtcctcatctcttgggtgggaacacgaagggaagccgggtctcatctctgtgtttctcttacagaagacaaccggcttccagctcagtccgacgaccgagagaccggtgttcatccttcgtcttccacacaagagagctcagtggaagaaagcgttcaaccttctacgtcctcgtcaacttctctcggtacgctagatgagcagacgtcaggagtgccggagagaacaccgtcaccggtctatctcgacttggatgaccagccgtcaagcagtgggtggaagagtgcacgagacagcctagccagatcagatgggaaatcgtcagggacattgtcaatgctgtcctcgaagagggaggggagcagggaacgagtccagaattctggctcgcctgcgacgagcggctcgacgagccgcaacaaggttaagacaactcctgcacatatcttctccgagcacagagctcggaccggtactgagttgggattttgcggattttactggcactcaaatagattggctaggctggggaccaatctcgtattcgataaggcaagaagagattttcaacaggccgcagtggatggaagaattggatggactgatttcagggagatactctttcaattcaagaaactgttagatcagagctatagaaatatgatgtatcacttttctctagggggtaactgtgacaaatgtacttactgggatgaggtctataagaaacacttggcgggtatagacaatgatgattctgacgctatgcaatgttcacctccaacagggggagacgaagtgagtgatcaggaaatgttagatttggctgatgccaccagttagacaaagaggacaatttagaggtgtactctttcctggctataattacttgggtcctttcaatcctctcgataacggtgaacctgtcaataaagccgacaaggccgcaaagaaacacgatcttgcctataatcaatatttgaataaaggtctcaacccatatttcagattcaataaagctgatcaagagttaattgacgatttgtctcaagactcttctttgggcggtcgtttcgctcgcggtgtattctcactcaaaaaagcaatcgctcctaccataaaggagcctgaactggcgccaccgaaatcagataaagccaaactcgagcgcaaactgtactttgctcgaggcaataaaagacagaaggttggacacccaaagcaaacaacaactcccagcaacgacgataatcctaacatggaagctgatcagcctatggaagagggagcgggagatgaacctcagccagctgctggcggagctagagcaggcccttcgggaggtcctgcaaacgcatcaccaggtggagtcggtatctccacaggacaatggatcggtggtgctatatttggatctaataccatcgtcacaagaaacacaagacaatggtggtgtccaatccgagacgatcacttatacaaaagatacgccaacggagtcgactcgaccggaacacacgtagcctacggctacaaaactccatggaattatttcaactttaatcaatacagcagccatttcaatcccaacgaatggcagcatctactgaatcacgcagccagattcagacccgttaaaatgacggtcaaagtctacaacattcaaatcaaacagattgtcgaccaagacgtgggcagcactctctatcaaaacgatctgacggcgggtctgcacatcttttgcgacggatcacatcagtttccatacacacagaatccatgggatcaacactgtatgccagagctaccaacgcaaacatgggaactgcctcaatacgcctacttaacagtaccttacgaatccgtcgacgacaacggaactaatgcggcagaagctcttatgctaagacaagagcctctgtacatgctggaatcggcagaccactcgatcgtcagaacgggagagagcgtggaattcaactttgactttagatgcggatgggtcgacaatacaagaacaagccagcagccggcatccatggccgtgaatcctctcgtcaactcaagactgggagaaacaatcagaaacaacaacaacgacggaatcacacagattccaggaaacaaaaaatggtccggatggctacctggaccgggcataaacggacaacacgcaaccgtaggaaatcgctcagccagcacaaaacgacagagacaagtatagattcgatcctagaacggataactggagaaacacattcctcatctacaatcaaccaaccaacgacgcggccagaaacaacgaatggtactacgctacacaagcaggagcatggcagcgacacaatccaatctggctctttccgaatcagcactgggattctacaaacataacgcgatacaactccatctggtgcaagacgccacgcacagacagacactccatgctcgacaccacagacggcactctaccgatggagcatcctccgggcaccatctacgttaaactcgccaacattccagttccgacatctacagcggatagcagatcctggctcaacatctatgctaccggaaacgtctcctgcgagatcgtctgggagtatgagcaccactacaacaagaattggcgtccagaaaagagaatcgacatcggaggatggcaaggagatggaaacgtctacaagatcgacacgcaaggaggatacgtatggccggacaacatcgacgaggccatgtcgaccagacagggattggagcggattctttaaacagggggaggggacgggaa

SEQ ID NO: 310 - DNA, 4315 bp, Feline Dependoparvovirus
  source 1..4315: mol_type = genomic DNA; note = Feline Dependoparvovirus / Dependoparvovirus carnivoran 1 - NC_076473
tgagcgagcatttagtgaactctacaaagagaagtttgtttttaaatgatgcactgcttgtcattggttctcaggaaggcgggaaggacggaaccgcctataaactctgcaacggataccgtaggacagtatatcttcagggaaaagaaccgttgtgtacagctccgggggtaagatggctcagtactatgagattgtgatgaagctgcctaatgacatatctacccaggttccaggcattctggaatcctctgtagatgtcttaacctcacagaagtgtgaattacctagcctaagttattgggatctaactttggtccccaaggctgtagtatctctcgcttcatgcctcgtcagagtcattattgctttctggcaatgtatcaatcctatagctgcctgtccttattttattcaactggaaaaaggaaaggaatggcaccacttacatatccttctcagtgatgcagcatgtgacagtttagttcttggaagatacactaataagctgagacatcgcctagtggatgctgtgtatgatggaattgaacctgacatacctgattggttttgtgttcataagaccagattgggaggaaagaacaagaaggtgggtgaagactacatcttcagatatctcctcagcaaggtacagccggatgtcctctggtgctggacggatctgcatcatcttcaacccttggtcttggataacaggtgccgccaggagcttatggtcaaggctgaccgcgcggcggccgaaagcgaaagtacagaccaatctgaagctgcggatcgagcacccgtcatttctggaattggagctgccaattattcaaggttggtggaatggctggtagaacaaggcatcacatctgaaaaacagtggctagagactgacaaaaatagttataggagctttcatgcaaatgctaacagttccaggcaaatcagggctgctctagaaaatgcaagagtagaaatgctgttgcttaaaagtgctggggactatttaataggagactcttggccttctgacatagaaagtaacaaagtctataaactgtttactctgaatcggtatgatcctgctttagtgggaggcattctgttgagatggtgccaaaaactatggggcaagaggaataccatctggctcactgggccagcttctactggcaagaccaacctagctgaagctatagcccacgcagtacctatctatggctgtgtgaattggactaatgagaattttccatttaatgactgtactgacaaaatgattatttggtgggaggaaggaaagatgactgccaagttggtggaacctgccaaagctatcttgggaggaagcaaagttcgggtggatcagaaatgtaaacagagtgttcagatagagccaactcctgtaataatcacctctaacatagatatgaccttggtgatagatggcaacagtattaccagggaacacgaagaacctttacaacataggatgtggaaaattgttttggactcggtccttcctcccacgtgggggaagataacctctgctgaggtgaagagctttttagcctgggcttcagatcaaaatgaaatagtacagccagtgtttgaagtgccacgagtacagactccaatacatgagcaggtcatggtagacttaactcttccagagctggactcagtgccttgcaatcgaggttccagtacacccccttcggaagaacctgtgattgttccttgtgcgacccctcccgccgtgaggccgagcactcctctaccatccccgaggtatgtcaggtctgtaacttatgtctgtttggagcatgatagaggggattgtgaccagtgctctgaggaagagatttgcttcacccaaactgattggttacagtgtgatgagcgaatgtctactatttctgaggagagtggtatagaacctctgctgacacctactcccagtcccccttcttttgagatgtatggttggagtcccattactctgcatgaagcttttgatgtggatttccctgatcctgaagaatagaggtgttcttcctttccagggaagaagaacaaccagtcccagcgccagcgaaataagtctatattcacctggcccggttacaactacctgggacccggtaactcccttcaagcaggaaagcctgtgaatcctttagatgaggctgcgcgagagcatgactttgcctatcaagctatacagaatcaaggtataaatccatatattaactataatcaagcagataaagactttcagaaaagaatccaaggagatactagtctccctgggaatcttgccagaatcttttttcacttaaagtctaaagttgctccagatatctcagatccttcagaacaggtagatgccaaagaagagggtgaagacccagcgccaacagcagaaaccttactgcctgcacccgccaatacagccagcacaggaggtactgcctctacaggacctgaaggacaaccaggagaagaacctccaaaaaaaagaagaagattgcaaaggaaaagaggaagactcatcaccatgtctgatatgtctgcagatgcacctataccaacatcaattcgggcaggagatcccggcccagctaatgcttggactaactctgcctcctggggtaatggaactgtaactaccagggctactcggacctgggtgtgccctgcttataataatcatttgtacaaatctttgcaattgaaattcactaatagtgatatcaatactggaccaaaatcacactttggttggagtactccatgggcctattttgatttcaatagatttcattgtttatggagtcctagggattggcagagattggttaataataatactgggtttagacctaaatctttaaaggtctctgtttttaatgtgcaaattaaagaagtatctaccattcaaaatactaagcagattttgactagtacaggaggaacagttcagatactagaagacaaaaggcacactttaccctatgtgctatcctcttgtactactggtgcttttagccctttcccaaatgacattaccatcttacctcaatatgcttacgtgtctatgcatgaattaggagagcccacgcaggacactgcttttttctgtttggagggtatggattctgcaatattggggaatggggattcttacgaatacatatattactttcctgcacttccattccattctgcataccaaattaatcaatttttacaccaaactgcaaatcctttgttggatcaatatttgtggatggtcacaggaacagataatcaaggacagccaacctggggaaggcctcaaaaggctgattatatgcatcattatcaaaattggctttatgggcctcaatggcaagtacagatgatgcaaatgtctacgcagaactataagaatttatctcaggctcagtgggatcaaagtaatcctcgagttcagttgtttaaccagggtttactgccaattaaacctggtgttcctggtttctcaggcagtacaacaaatgtatcagctcccaataataccatatactatgatgtctcagattcaagacagaaagctggtagtactataggaactacaggcccagacaataccagaggtacacctgttggtatagatatggcccacgaaggagaagtgcgcaccacaaatttacctgctgcacctcaggttttttacccctcaggctctaatgccacagtagctacagcaacagcaactgctatgaaaaatgctcagcaggggtccactgaccaattacattacttgggcacatatccaggcatgatgtggatgaatagggatatgtatttacagggacccatatgggctaagatcccaaatactgatggtaaatttcaccctgcacctcacatgggagggtttggaatgtccaatccacctccacagttattgataaaagtcaccccaactcctgcagacccaccatccacataccaggagaaaaccatgacatctttcttgacacagtatgcttcggggcagattacttatgaaatagagtgggaagtagtatcttcccattctgagaggtggaatcctcaagaacagtggtcttacacctcagcggcggcacaaaacaatttcttttgggtagatgctaatggcctttatcgggaagggcaggtggtgggctcccgatggatttcacagcatttgtaatgtgcaagtacacaataaaaataattcattgcatctcctattcacgtgcatagagattctttgtagagttcactaaatgctcgctca

SEQ ID NO: 311 - DNA, 5278 bp, Canine bocavirus 3
  source 1..5278: mol_type = genomic DNA; note = Canine bocavirus 3 - NC_076995
catgtttaattctgtccccgcgctgtaacaataaaatttattatgtaatgcgtcgaatcacagcgagcggcttcgccgctgcgccctgcgggcgcgctgtaatgatacttgcgcgtcatcagtgacgtatgctactgcatatgcatattaaagaaataacaaaccttaatattcataaaaataaataatgcaaatatattctatgacgtgttatcatgtgacttataggaaccaatcacctacatgcaagttctgttttctgattggttgccttagactatatcaatgcacacccggaagaagttgcatcattctgcggagacctcgacacgggtgagtgctgctgctatgagcctgggactagcactgtgcaatatggatcgccctagcatcgaggaactgatcagatttgggggtcctgcatatacatatgtcctcaaactgcctcttaagaactggcaaaatgttgagttagctctgcagcactcattctctcctatctttggagataacattgatgatcctcaaatcttctcagtgctagatacctgtgatgacgtgggcaaggtgaacttctacaaaacttataatgaagccagaacattcatctttgttctgactgatgctgcacacaaagctgctaaaactatttttcagcgcagacagtgcagtcctgtccctgtagctagcatttacgcgcaaggagaattaggccagcaacatctgcatgtccatctggtacttgctggtctaggattaaacaaacatactgctaagcagtggcgccatcaactagctacagagtggattaaagaactatggaaaccactcaatgagacagccagagtgcgtcctgtggatcctgagaccaaactcatgttagagattgcagaagcatctctaactgacatgtctggaggcaaggtctgctcgatcctgcaataccgtgcaaaggatggatctatgtatgcgtgcagagtagatgcaattgaatacatctgcaactacctgcttcctaaaaactttaaatactactcgttcatcaatcctatgaatgctactgtcagcatgtcaaagttcttggaaattggagctaacaagacatatggagctacattacttaacggggcattaattccatatgctgaccgtaagaagtgggttgatcagctacaagaacacaacattaagaacttaaaagagcctgttttcactggagatctttttggagacttgccagaggtatctcgggccatatggaagggtggcgggcaatctggcgggaaaatgactaagaaagaaactctaatgatagactgtcttagacgctgtcatgaaaaacatttattgacatatgaagatctagtaaatgaatgtcctgacttactaattatgctagaaagtcaatctggtggacaaaaacttctagaacagaccttacatatgatgcatattaaattgactcagtctcatactgcctttagctttatcaaagtgcggtatccagagactatttttgagtctacaaataaagtctttaaactgcttatgtatcaagggtacaatgcatggcaagttggccactgggtcggttgtgttttagataaaaaagcaggcaaacaaaattcaatttccttatttggacctgctagcactggcaagaccaatcttgccaaagcaattgttaactgtgttaaactatatggaaatgtaaatcaccttaacaaaaactttgtttttaatgattgcgcgtctaaacttattatttggtgggaagaagctctcatgcacactgattatgttgaacaagctaaatgtctattgggaggtacagaattccgcattgaccgcaaacataaagactcacagctgttaccacaaacacctgtcattatttccacaaataacaacatctatgaagtaacaggtggcaatacagtttcaggagtacatgcaaaaccactaagagaaagaatagtccaattaaacctcatgaaacagctaccagctacttttggagaaatcactccttcagaggttgcggcttggctcatagcctgtcacagcaaattcacatttaccttagaagacttttacaaacaatggtctttagatgtggtgccaaatgattttcctctaactgaaccttgtgtcaatcactctcaggactttaccttagatgattgcggaatttgtgatacttgtggttgctataagcctcttgacgtggactggcctgacactctggcaacagacacaggaaaatcccttacaggtactcctttcaaaatccttagtcctacaaaacttcatttttggtgtacagactttgacctaagttatctggattcacctgcaggaccttcgaggaaacgggatcatactacaccgatctccgagccaccaacatcatttggttttcttgcgcctgccgcgcctaagaaggccaggcagaagctagacttcaaacatcaggtacttgatcggtggtgttctcaaccaagagatgagctcgagaccaagctctacaaagaagagatgcagtccatctcatctctaccagaggagccgaagccggtcacctctaaaaaagggctcaacccatcagagtggggagagaaattgggaatccaagtgcaaggcttcacaaatccaccaatcgttctccactgcttcgagacaattccggaaagcgaaaacgactccgattgaagttttcagccggcacagagccagctataatgtggacatttcttactgtggcttttattggcatagcactagattagcgcgcgcgggaactgattgggtctttaatgagggcaaacaaaaattccaatcacgcatggaaaataatgttgttaagtgggatgatgttagagaaatattatttgattttaaaaaacatattgatcaaaaatatagaaatataatgtatcattttagtcggggggggcattgttcaaaatgtgaatattgggataacatgtatctacaacatctcgcacaggttgaaaccaatcaaacaattgaagtcactgaccaagaaatgctggatatggctgagcaattggatggctccaattgctagaaagccaaaagggtggcttttccctggttacaaatacctcgggccttttaatcctctagataacggagaacctgtaaataaagctgattctgttgccagagagcacgatctcgcttatagcaaatatttagaagctggaaaaaatccttacttaaatttcaataaagctgatcaaaaatttattgacgacctcaagggtgattcttccatcggtggttttgtgggcaaaagtgttttcacactcaaaaaacacttatttccacacttaaaagaggtagctcctccatcaaaaaaaccaagaacagactcacgcgcagaaaaaagaaaactttattttgctagaagcaataaacccgcaaaacaaccaaaaatgtcaaatgatggatcttctatggaaggagccagcgatcaaacagaaggagctggcagaagccgcgtcgctcgttcagcgggaggcggttacgggggacacggggttggagttagcacgggagggtgggtcgcaggcagtattttcactgacaccgtagtcatcacaacaaacacacgtcaatggtatgcaccaatatatgacggccataaatacaaacagattatcgccagtgacaatggtgcgactggcagtgactggctgggaatggccacaccatggggctttttcaacttcaactgctacgcatcacacttctcacctcaagactggcaaaggttaacaaatgaatacaaaaaatggaggccagtcaaaatgacagtaaaactttacaacctccaaatcaaacaaatagtaaatttaggtaatgacattctatacaacaatgacctaacagcaggagttcacatcctttgtgatggcagtcataaatttccttactcacaacacgcatgggacacatccacaatgccagagctaccatatgaaatatggaaactcccacaatacgcatactaccaaacaaatgcagacctagacaccaagacgggctctgatgccgtcaccaatccacatctagttgccaaaaacataaaatttgctcaaccactctatatcctagaatctgaggaacacgcagtactcagaacaggtgaagatgcttccttcaactttagctttgaatgtggatgggttcataatgacagatgctactgtccaccacaagctgatttcaatcctctcacaaacacaagaagatactacccatcatatgaagaaagtactcaaaaatatagcttttccagatacaatccttacaaaaaaccaagttcatggtttccaggaccaggcatgaattttaagggcatcatcaaacccaactcaggagccaacacaggcaagacaacaggtccaataagcgtcgtctatcaaccaccatacacaacgtccagaaatgcacaagccactgcacaatcacacagcatagcagtacctaatttaggtggtatcagagttactggttataatgttgctcctacaaatggtgcttgttccacaatagaaaatgtaacgctagcatatgactcagcacctcaaagtgaagaagtcaatgctatcactcaggtggatactgactataacatgtccagatatggttctgtatggtggtccaacagcacagaagaaaaagccaccggctttaactctgtttggatgtatccaatgcaagcgtgggacggaatcccaattagcagatatactccaatttgggtaaaaataccaagaacagacttccacacaattctagattcaccagatggaactctaccaatgaaacatcctccaggtaacatcttctgcaaagttgcaaaaattccaattccaacaagcaataatgcagacagcttcctaaatatttatgtcactggacaagttacatgtgaaattgtctgggaagttgaaagatatgcaacaaagaactggcgtccagaacccaaaaatgatccaaatagctggaaagatgccaccatatacaacatcgacaaaaccggaaaatacaacactccagaaaacttccgggaagaaatgccaacaagaatgggcatcaataaagtcctgtaataaaatatgtattcaaattgcgcaaccattcaataaaattttgttatcacttttactgacctgcrcttgcatacgtcacttaatttacatgtttaattctgtccccgcgctgtaacaatacgtcactcaattta

SEQ ID NO: 312 - DNA, 5494 bp, Rodent tetraparvovirus
  source 1..5494: mol_type = genomic DNA; note = Rodent tetraparvovirus - NC_077009
aagcggaaacacgtcaccgaaactagttcaaatggaccaatcatatcaaagacgtacgtctttgatatgattggtccatttgaactagtttcggtgacgtgtttccgcttccggtggatgtgacgtagcggaagctgacgtggccggaagcgtgacgtatttccgtttccggcggatatgacgtagcggaagctgacgtggccggaagccggatgtgatgtagcggaaactgacgtgtccttatgactatataagccgcccgccacacatacctcgccactctgatttaggagctgacaccgagaggatggatcccgtctgtttttcggctgtgatgcaggtcccggagcagtgcttcagtgaagagtggtgctggagagactttgcatcccttagcgggcccctaacttcgactgagaccagagatgtcctggattggcctaccgaggacctagaccgtgagtacccctggtttaagtttgctgtgcatctgagccaggtggtgttcatgcagctcatggactgccaccacattttattccctcatcatatcaggccgtgcatttacctgcaggctgagccatctacctcagaggggaatatttttcacctgcaccttgtagctagcaaggaccgcaagtcaggcagagagtttgctaagtggctcaagaactttagagctctgatggccacgtatgtgcttaccgctgaattccctctgtgtttcaatttgagaaaaaccagtcaaggtcgcctgtaccagagcgactactcattcatccggaattatctgcttccgaagttgccgcttcagcactgtgtgtggggcgtgactaacattgacaggtttcatggggcggtgctcagcgtcatagcccgccaagggactaatggaacagacgccatcgccctgccgtacgacctttcgagcggtcaggccgaacacgaaggtagagtggaagcccctgtcatggccggtaagtcggcggaccggtttttaaaactgattgactggctggtgctggagggcatcgccaccgagaagaaatggcttgcagtagataaggtcagctaccgcacctttctggcgtgcagcggtggcgtgctgcaggcacgcaatgctttggccattgcccggagggagatggtactaactcataatctcttggactatcttgctaagtctggagaggtcatgggcccggaaaatcgcgtctcccgactttttaaactgaatgggtatgacccagagaccgcggcctggtactgtgctgcctgggctagaggagtgtggcctaagcgcagagccctatggttgtgggggccggctagcaccggcaaaactcttctagctgctgctatcgcaacgctcagcccctcatatggctgcgttaactggaccaatcagaactttccattcaatgactgtcactgccagtcactgatctggtgggaagaggggcggatgaccgaaaatatggtggaggtggccaaagccatcctcggtggagccccggtacggctggatgttaagaacaagggaagcgaagacttccttcccaccgccgtcattatcacctctaacggcgacctcacagtcaccgtcgatggcccggtcatgagcacggctcaccaggaggccctgcagacacgcattaccatgtttgagctccttaagactgtgccagaagggctagcgcccatcaccgaaaaggacatcagagattttttccgggctggcgaggagctgctgtccctgagaggcaacccgcccgaaaccttccgagcgccccagcggagcgagaccggagcagcgctagcgctgacgtgtctccaccaggggcggtacatagaggaggctgccacgtgggattcagaggacgactggttccccccgcccgctcagaacaggaagaggcggcgcacgggtgatgactccacctccacagtctccgccccaactccaccccctaactccccggaagaggaggagccaacggtcacccagatcgtcagcgcgccttttccgccagacagccccacggtgccggaggaagaggagactctgagcgccaggtacgagctggagatctggtggtggaggctgctagatgatatacgtcgggcagagaccttgtttcttatgccccctaaggggccaggacacccaccgggttacggcctgttctataccgctctgtggttgaaggagccttggagataccgctgttccttaaagcgagcggaggctcacatccagaaccgtttttttgagtgggcgcactggtgactggccggtaagttcacaagggcgcccctgtgttacagggcggctgagcgggccccgggaccaagccaaccggaggagtgacgcgcattctctttgcaggtaagatgtcggcggccgacgcgtacacgcccggcggcaagatgccattggatgacctgatggcaaagctgtcgcgggccatcggtcaggggcctcactgggtggctgggggtaaccgcctgcccggcacttacctaggcaacctggccgcggggatcaagtatgaccgtgcgtttgccggtctcctagcctatggccgctctttgccccccactctgcaacccatcactcgcatccttcaagttctggaggccaagcgccgtcaaacccagaacctgaccaatattcacaaagtgtacttggatgcagtccgcctgctcattactgtctctgatgataaggcggtagaaatgttgagagccagcgcccgtgaggctagtcacttaaagggaccagatgtcacggcgctacacaaactcgttctggaggcgaagcatgcccatccaccttccagggagtccctggaacactactttgaccagttcatcaccccggtggaccccggggagcccgagattctaaagcaggccttccagcgcatggtagaatattaccaccccgcccctcaggatggcggacctgctcctccccctgtcgtcgatcatgagggagctgctaccggccctgaaccacacggcgaccgagctggcgcgggagggggtctcgtggtccccgggtacaattatgttggtcctggtaatcctttggataatggcccccctcagggaccggttgatgaggccgcaaagagacacgatgaacggtacgatgagatgctgaagcatggggacatgccctatctgcatggccatggggcggatggcatgatgggaaaagagattgccgaggctgaggcggagggaaaacttacgggtgcggtggacgcggtgctgggcaacgcgatccgcggcttgtgggaggcgaaggaggttgctaatcaggtggccgatgttcagctttcgcaggttttgccgccgaaccctcccagcggttctctggaaccgggctctttagacggcgagccccattccaagaagccgaagacctcttcccctgaccctgcaccccccgaacaacagccggcccccgcagtcgagaccatgacggacgcagccggcggtgggggtggcgtgaaaatcaaggcacagtgggttggggggacatcttttagtgattcatccattgtgacctcgcacacccgggtcggcgtcctcgccgacagaggaggctatgtccccattcaccagaagggcagccatgactctgccctgcagcctttactgggcatgaaaaccccctacagctacatagacctgaatgctttttctgtccatctcactccccgagacttccaacagctaatagatgagtactcagaaatcagacccaagtctctgactgtgtccctctcggccatagttgtcaaggatgtatccactaccagtaccggaaccacagtatccgattctggttctggaggcctgatggcttttgctgacgacgggtatgagtatccttacgtgctagggcacaatcaagacaccctgcccgggcacttgccgggtgagcactatgtgctcccgcagtatgggtacgtgacccgggggcgggaatatgatacgggcagtgacatcgaggtcatcagcaaccaccaaaccgagctatacttcctggaacatcatgatgcggactgtgtcggcacgggcgacacgtggtcgcacacctatgactttccttctgaccttccctggcgaaagctcactacgcccgctcagtctctctatgggcgtcacaacccggtgcaacagtcccgcatggccatcatgacaggcgtggacgccaacggagtgggcaaatggaaacgtccaacaggaatggacattggccaactgcccctgaactatattccaggccctgccatcatgacccctacagatcagcaaatgaaaaatgtcaactttactgccccaattgccatgggaaacccagagacgggagataagtattcattagccccccttgtccatcaaccttggtccctgtcggtggacagggcaacagcgggctcggtctccaccaaggtgcagtcggggatcggggccatggcctacacgggccgaacgcacgaagagtcttatgcccagtacaatcacgagacagacggcagcgtctcaaagccgagtctggttatccagactgagggagaattgtcagcccctcatttaggaggcgctttctttgtgccggggcacaaaaaggtttccggtcagggacagtcggccgttttccaggctacaatgttccaggagccagtctttccgctccttcccggagcggtgtgggaccctaacccactaacctacgactgccagatttggaccaagatccccaacactgagtgccactttttcgctcagtatccattacttggagggtggggcatgaccacgccacctcccatgatcttcctgaggcttagacagcagccgggacccccagataacggcgcatacaaagtcaccaaaagtaacttgaatcagtatgcagtctttaatttgcattacagcatggaatttgaggtcaagcgtagaaagcgcagcagaagacataaccccgaaaagcctgcgcccttcccggttacagacacaggcagggccccttaccttatggctaattcagcctccgacacgcagaccactgtatatgaagtcccgcaaaatcaatgggtcgcaaggaattactcccgcttactgtaaaacccctcgtcgccaaataaaggatcgcttgctttcaaacgtcttctcggtgtcagctcctaaatcagagtggcgaggtatgtgtggcgggcggcttatatagtcataaggacacgtcagtttccgctacatcacatccggcttccggccacgtcagcttccgctacgtcatatccgccggaaacggaaatacgtcacgcttccggccacgtcagcttccgctacgtcacatccaccggaagcggaaacacgtcaccgaaactagttcaaatggaccaatcatatcaaagacgtacgtctttgatatgattggtccatttgaactagtttcggtgacgtgtttccgctt

SEQ ID NO: 313 - DNA, 5420 bp, Opossum tetraparvovirus
  source 1..5420: mol_type = genomic DNA; note = Opossum tetraparvovirus - NC_077010
cgtcgcgcacggatgacgtgtttccgcttccgggtcaccacttccggtttccggtgactcagcacttccggctgatgcaacttccggttttccataacacgtctacttccggtatgacgtgtttccgtttccggtgactcagcacatccggctgatgcaacttccgggttttcattcatcatcttccggccacgccccggttacgcccattgccacacctacctcgcctatatgattagtgtcaccctctgtgagtttcagtctggcccagggccccgcggagagaggagctccctgctgctggcatgttccaggcccgtgacgaccctgtacactttaccaggatgactgccctgtatggagagtgctggatggctgtgctgaagctatctcatcgtgccctggacccggtacagtatggggggaccagattgaggggggatgttagattaccccctggtagtgattggcctgtggctgaactccgggaggctcaccctgcctttgtagtggctgtaaatgtgggggacttagtgtggtcagagttgctatacatgcataatttgactttcccccagtatactcagatgagctgttttatgcagttagaaccttgtgctcccaatgagaactttgttgcccatctccatctggtgtgggtatttgggagagttacacctaaagatgctggcaattactttaaggcctggaggtcctctatgggtagatacttagagggtggcatctttccaggcaactgggagattaagaaaactgcccagggccgatggtacagaggcacagatggattcatagatgaatacttaatccccaagttgcctcccaaggatgtctggtgggcttggactaccatgcccaaatatgctgagcctctgttaaatgagcctctcaggaggcaggcctgtggagccattgccttgcccttttcagactcccctacagagggaaacagagaagggggagaccaagcacccaccatgggtggtagggcagcctctagattcttagagctaatagactggctcgtcagagagggcatctgctcggagatagagtggctgagaaaagataagcagtcctacagaacctttatggcttccagtggaggtgttttacaggtcagaaatgccctcacagctgctgtgagggagctcaccatagataacaggttacttgaatttctcagcaagggaattcaggatgaaggtttactagactgcatacaaaagttcctaaaagctaataatctagatcttagaactacagcctggtacatggcagggtgggcttctggagtttggcccaaaaggagagccatttggctccatggtccccccaatactggaaagacagtgtgggcctctgagatagctaggctcgctccatgcttcgggtctgtggcctggactaacgagaactttacctttaatgactgtgtgtgtgtccccctcatatggtgggaagaaggtagaataacagaaaagattgtagaagcagctaagtgtgtgctgggtggttctcctgtaagaattgacaggaaaaacaggggctctgatgagtttgtgccagctccagtactcatcacctcaaatggggacatgactgtgacatatgatgggcccatcgtctctaaggcccacagcgaggctctgaggtctaggatcacccgtgtgccattcacagctgttttggctggtgaagacgtggcagctatcaaggctgcaataccagctttcttccaattgggggctcggctactggctgagcacggaccgcctcctgaggcaaatgagctgcccgccaagtcctccgtgtcccaccctggttcgccagaccgtggcgccgccccacaggcggagcaatgggactcagaagaggattggttcccgccaactcctactccaccccggaggaagaaacgaaaggtggcccgcgccattggtgacgaggactctgatccagacgtcaggtactggctgcgcagggcggagtggtaccggtactctgagtgggcggaccaggcaatatatgttctgtgtccgatactgcaacggcatcgccaggaccggcctgggctcttctacctgtatagagccactcagactccaatatccaggaggctgtctgtgggccgcagcgaagcggtgctgtgtcgtgcttttactgctctacttgattggtaagtcctttctatttgtatttttctccacagcggagcctctgcactggttgctctggccactccgggggagtatcatcccgtggccggctcatctaaagaaaaagcctgatccagatctcctttgcaggtaagatgaccccccccttggaagaggccctgacggctatgcagaggcaactaggcctggccactggatctggacttgagatgagtgccagcgggagaggcaaccgcaataagcggcctcctcactctcgcaatgtagccatcatcaaccaggcaatggggaagttctttgctggcttgccccgatctttgcagcccgtaaaggatgttgctcaagctttgaagtccaccctggaaaatcaccgatcctgggcggttcgagctgccattgctgctgatcttctccgcctaggcctcactcttgatgtatcagaggatactaccaagagactaagatctgctcttggggaatatcctcagggtcccttcactcctaattctattatgggcatttatactagagccaaatcagttacctctgtgaatgcagagaggctccaagacttttttactgactctattagtgcgggtgtagctggaacaccactctggggagatactgcagaagctctcatgtcggcccttgcagggaatggaagtatcagagggtctccagctcctgaggaccatagctcaggcaacagccaaccagacagcggaggcaatcctgccgggggcgggctcactctccccggctataattatgttggtcctggtaatcctctggataatggcccccctcagggcccagtggatgaggcggctcaacgccatgaccaacggtatgatgagctgctgggtcatggggatgtgccatacttgaatagtcatggggcggatcagatgatgtcagaagagctgaaagaggctgaggagaagggtcagctctctaacccagttgatgctgtggtgggcaatgctgccagagccctttggcatgccaaagacttagctaatcaggtggcatctcctggtctgtcacaggtccttccccccaaccccttaccggagtctgggtcgctgaccccggaaccgactggacccccaactccggactctttgcccaccggaggaccgccgcccgctaaagttgctcgcacagacgaagctgcttcgccttcaataaacatgtctactctcagagctggcaattttgacactcaatcttctgggggcggcgtcaaggtcaagtctcagtgggtaggggggactgtgttcagtgactctaccatacataccagccataccagaatcagcattatagctgataggggatcatatcaacccatacaccaagatggctcaactgccagacagtcaatgcctgccatagggatgaagacaccttactcttatgtggatgtgaatgcactgagtgcacacttcaccccccgtgacttccagcagttgctggatgagtatgctgagattcgccctaaaaggttgactgttaaactttctgggctagtcataaaggatgtttctcataataatgggacaacacaagtgaccgactctgctagtggtgtcatgacagtgtttgctgatgaagattatgattacccatacgtgatgggccataatcaagatacaattcctggacacctgcctggagaacactatgtcctgccacaatatgcttactttaccaggggcatggaggtgaagggaggtattgggtctattactatgatagatgatcataacaccagtctgtatttcttagagcatcatgatgctgagtgtctgtccactggtgattcttgggagcactcttatgatttccctgatgtgccatttaggaggttgacaacaccctcccagactctctatgctagacataaccccctgatctcttccaggatggctataatgacagggattgataatgcccagcgggtaaagtggaagcgatgcaaggggctcgatgtgggagagctgccccaaaatcacattccagggcctagtattaatagcccaactgatacaatgttggctaatagtaaacaagatttcataaagccattggcagtgggggatcccattagtcatgccagacattctgtggcacccttgataaaccaaccagtgtcatatagggaatggatcactaataccacaggtgtaaatcacacagccatttctgggtatgcttatactagaaggcagcacgaggagtcctatgagtcctacccagctgaagatgggggcacggtagctcagccaagtattcccataatcccagaagagaacctgattgggtttaagccaggtgatagctttgtagctcctggcagtgagagagtgtacccctctgatggaacctctggagaacctcctatttataatggtaaattatatgctgaacctctcttccccttactgcctggtgcctgttggaaccctaacccattgtcttatgatgtgcagctgtggtgtaagatccctgatactgaatgtaacttcatggctgagtggccccttctaggtggctgggccactaaacatcctccaccaatgatctttcttagactgaggagccaacccggacctcctgccgaaggggctcataccattactggtaatacactggggcagtatgctttctttaatctgcattatgagatggagtgggaggtggttcgcaggcctagatctagaagacataacccagagaagcctgctgccttcccaaccaccttatctggtagaatgccattcatgttatctaggtctgctgctgatactactactaagtatgaagtgccagaaaatcaatggatggggtataattattcaaaattattgtaaataaaaaaatctttaataaactgtaccttaatgagctgaaaatgtgtcctctcctctctccgcggggccctgggccagactgaaactcacagagggtgacactaatcatataggcgaggtaggtgtggcaatgggcgtaaccggggcgtggccggaagatgatgaatgaaaacccggaagttgcatcagccggatgtgctgagtcaccggaaacggaaacacgtcataccggaagtagacgtgttatggaaaaccggaagttgcatcagccggaagtgctgagtcaccggaaaccggaagtggtgacccggaagcggaaacacgtcatccgtgcgcgacg

SEQ ID NO: 314 - DNA, 5368 bp, Pileated finch aveparvovirus
  source 1..5368: mol_type = genomic DNA; note = Pileated finch aveparvovirus - NC_077011
gataacgatctttacgagaatccaactttggactcttgaactcttacttgtgatgtcttgctatcttcactcctccttcctccatcctccattttgtaattcgaaagatactagttctgcggccgaaggccgcgcgcgctacgcgcgcgaacgtatctttcgaattacaaaatggaggatggaggaaggaggagtgaagatagcaagacatcacaagtaagagttcaagagtccaaagttggattctcgtaaagatcgttatcagtataattgaaactagactttctggcgccagggtaatggttaactagggtggtacctggctagaggagtatataaggaggctgaaattttcactcattagctttctgagctcaattgggtaaggatggctattcctacttctggtgctttttctgctgtttttatgcttccagatgaaatccttctcggcaacaatgagttctctctccgaaacgcggtcaattctggttactctgatccgaaatctggtgagtttattaaatcaaagtttccaacaaatcacgaatttcttgaggatattagggcgtttgttggagatcctgggtggtcctctactgaccttgcctggatctggcttcacaacaacctaatttctcaagcgttgggaactgaaagtaagttgaatccttctgctaaaattttctggcagactgaaatttctaaagaaggcaaagtccatgtgcatattgttttcatttcgggatttcagagcaggaatatttcctggaccatgaaacgcattcggagagatatttgcaaagcattttctgaaattatgaatacttttatgcctgaatttggtacttctcaatggtgggctatgctcactaatatctcacctgctatgctgtccctgaatagagcctactcacccaaattgggcaaaactgtgccgcagggggtcaacccctatgcatttttaaaattttatctgtataatcctaaaaaaactgtgctgagccgtgggggtagtgataacattatggaccactaccccatgaaatctctggatgaccaatttgaccttcaaccggacgagtctgatcctcaagtgcccaccatgacggtggctcctggagatgaccttcctctgacttatgtgagtactgaggctgattgggacgcgggtggtggtctttccgtccttaagacgggggtcatggaaaaattatgcatggaggccttgcgtttatgcaaggaaaagatgatttttaccgagaaggattttaagctggaatatcctgataagtttttacaatttgccagtagaaccagaggtattgaaaagctgaatgaaactattgatttatttgtggagacaattactgcccgtgagtctgcttggaatatcgctaaagctcgtatgggggaagtggatgaaattgatctggacaataatttggtggtccggttgctgacccaccagggttatgcacctaaatatgtaggccatttattggtgacttggctatctgacaaattgggcaaaaagaatactgtttatttttttggacctgccaatactggtaagaccatgatggctgaaagtatttgcaaaatggttggcatttatgggaatgtaaaccataataatgaaaattttccatttaacgattgtcacgctaaagctatcatttggtgggaagaatgctctatgaatgagaaatatgtggaagcagctaaatgcatacttggagggtctgctgtcagagttgatagaaaaggtaaagattccatgttggtcaccaaaactcctgtggtggtcactagtaataacgatattacagtggtcacttccaggaactccatttcaagtgtgcatgctgctgctttaagatcaaggtgcatgaaatttcatttcacttcctggttaacgagcaattggggcttaattactccacaaatgatgtatgagtttttgatttgggctgaaaggctgtacgaccccacattggatgggatccttcagcaccagccacaatttggagataatatccctttcaaccaaccgagaggtgaatggtgctcggattgctctccacagtttaccacccagcctactgttaccgtttgcccgacttgcactggttggaccagggtccccgtgggggacttaagctgtgaatataccggaagtgaggtggagctgatgaacaatctgactgaaggtaagtgggcgtagtcttaaggggttccgagggtataaataggccttaattctatgcccccttacagagcagcagaacgtccttgcggacgacgagcgcgctcgtgcttcctggatcggaagacgttcccgatttgggaggaaacgtggagctctcgtactcgagcccgaagagggagttgaaaataagcgggtcagtggacacgggtccaccgtgctgccgactcctgtgaatcctcgtaagtgtgttcgtttttcagataacgctccatccgtgatggaactctactgtgacgaggagatgccggaatctgatcccgaggaaggaccctctgatcaaattcctccacctaaacctagagattatgtgatttggggaaatgacaaaaagagatggatagagagttttgttagaaaatggcaatgtgcatttggaacctttttagattggtggtattgtaacattagaagggtaaatgctgtgtacactaaagttgagcatacgccctacaaagaaacgttcatggacctttggactgagattagagagttttatgatatggcttgtgataccgaaaggcaaattcaggaaaacattaactctgacaattggacttataatctccacctagatttacaattgaccaaaggtcttgaacagaccatgggtgattacccattaactatttggtgcaaggtagacgagctggccaaatggtgtaatcaacaaatattttctgcaggaccatgaaacggccttattcaccgagattgccaactaatgaagcggagtcctatcattataatagatggtggattgatcatgtatctaaggggcatgtgattggcggtaaagccactggaaaaggagtaaagactcctggaaaacaattaactgatcagcaaaaacaatcacgtaaacgttttttcattgtgcaggctcaacagaaaaagaaagctgaaggaaatccaaaatttggaattccgaccagttcacaacataaacgtttctttgctaatcatacgggcaataaaggtggtgggaaagctaaagctaaaacaaaacatattgagccgggctaccagccccctaataatcaggatcctgacgagggtcccgctcctaaactccccagaagacaactcaactgggaaatcagccaatcacagtcctccgagaccgctccaactcaagcaccacaaaaaagtgctactcctgcagcgtcacgaccggcaacacctgacaacgttttggaaaccgtgatgagccacgagaatgaagtcgagatgccccagatgccagaagccccctcccagtcaggacttgctgctgacgacggcccaggctctggtgggggtgggggtgggggtggagttggtaattctactggcaattggacttgtgaaactatttggggggacaattatattgtaacaaatgcttccagacattgtgtatgcttgcctagaaatgaagattcatacaaactcatttcaaattcaacaaatggtgatacaataaatcaaactgagcaatccatgtacttgggctggaccacaccctggaactatttggactttaaccagtatgccattcactttaaaccgagtgactggcaacgcctgctgaataccgcctcacgttggaggcctcgccgagtccatgtaaaaatattcaatattcaagttattcagaaaaccgaagtaaacgatgcctggcaattcaataatgatctaacaggcaccattcaagtttttgctgaccaagaaaacagatacccaaaactcatgtacccatgccaaaccagcatgatgggacccttccccaatatgatatattactgcccacaatatggctatttagccagtatgactcaagcgagcagccaaactaacatgttaactcttaacacccagttcttttgtctggatgaagcatctagcaccatgttaagaactggaaataattggtcttccagttttgagtttgggcctgataccccttggtgcagtaatagacgtactgccagacatattactaggaggatgaaccccctctatgatacttggaacaccaatatccaaggtcaggattgcatgactgggtcattctctacatggagaagtccatggttgagtggtccttggatggacctttatgaggcagctgaaaatgaaactatgccgaatagcagtcatgtttatgtcggtgggaccgcgcttggcttaaatccaggacccccaccaggtcaagcaaccaatgcagcccataaacatactttctgggttcccaaaaaaggtggtatgaatgaaggtgatatatcagaccactatattgatgcaaattctgccaccactatatcaattgatgatactagaacatattttattaaccctcaaggagcctataaaaccagagcctctagtaatactggaggtgataatggaggcaagaccatcctgcagcacatgacaggcctatttccagacatgatgtgggataataggccagccagttattgggataatatctggcaggaatatccagaatcagataataaaactatcatgactggaaggttgggtggaattccggtagaagccgctccaggacacattttctgtaaagtaactccaaaaccatcaggagatgctggaagttatctaattcaatttgcaacattcactgtaactgtttccattgaatgggaatatgaaaccaattcctacagtcaatggaatcagagaccccttatcagctggaatacccaatcggctttggaatatgatggactttgtgatgaaaatggaaaatatcttgttgcatgtactgatcgcgcggttgagcagaattatttggccaaagtccacaacagaacaaactaataaaccgaaacgtgttatgtcacgtgatgcgaaaactgaactctagactcttacttgtgatgtcttgctatcttcactcctccttcctccatcctccattttgtaattcgaaagatacgttcgcgcgcgtagcgcgcgcggccttcggccgcagaactagtatctttcgaattacaaaatggaggatggaggaaggaggagtgaagatagcaagacatcacaagtaagagttcaagagtccaaagttggattctcgtaaagatcgttatc

SEQ ID NO: 315 - DNA, 5227 bp, Rodent bocavirus
  source 1..5227: mol_type = genomic DNA; note = Rodent bocavirus - NC_077012
gcgcatgcgcagacaatcaaacatggagtcatggtagtccataaagattatatcattatgtgggcatgtccgggcatgcgcggtcataccggaaacaagaataatgctgagtaaccggaagtccttgaaccggtcatcatgtaatattttaataggtaatctttgtgggtggagctttgtatataaaaggacctcgcacacttgctcggcgccatttcgtccttttcttttggaagagaacgacgctctcaatagcggtggtgagtacaacatgcctttgatcaacttccaagctgcctttgaaggatttggaggaatcgcatatacatacatactgcgccttccaaaatttccttctaacgactatcataatagacttcagaagtgctttggaaatccgaagtatgctaatcttcatactgaatttctgcgctctgaagtatatgatgattttcctgaagattgctcagaccttaatgatttccaacaaaagacttatgaaagagaaatagcactttttgctgaaattgcagttagaagagtgtttgagcaacagcaaatgacaaaaatgccagcatttagcagctatgttcaagtagaacatggatctaatttgcatgttcacttagttctatctggatcgggcttaacaaaatatacagcaaaaagctttcgtccaaaattggccactttgttctatgcacaattagaacaaaggcagaaagagaacttgaaagatgaatatggctcagaagactggaaaccatacacagaaccagtctcagaggcattaactcaatcaaactatggaagctctaaattttgcacggtgctgcaatacaaaagcagaaatggagaaatgtactcttgcagagtagaagccagaagctttattgctaattatttgctacctaaaaacctggaaattggatacattaattggtcaaacatctacagaattccaggagactgtgctgatggatttagcccaactactaaaacttatacttataccagcttaaattctatgagactaccagtaaatgaaagaatcgacctaaaacaatggctagaaaaaacatacggccttaattcttctgaaccaattttcactggagatcccttatcagacttaccaaaggtaagcaaagctcaatgggacaaaactactcagccaggagggagaatgtctaagcgggaaagcttggttttggactgtatgaatagagcaattgaaagtgactgtttaacctatgaacagctcgtagataagcacccggaactagtgataatgatggaaagtcaagcaggtggcaaccgcttaattgagcaaacattaactatggtgcacataaaacttacgcaaaagtatacagccatgtcatatatagttcgacggtttccgacctttgaaatacaaccaaataataaagtaattcggctgttaaatttacaagggtacaattgctggcaagttggacattggctttgcacaatcttagataaaaaaggcggaaaacaaaatacaatgagcttttatggacctgcaagtactggaaaaacgaacttggcaaaagcaattgtaaattgcgtaaatttatacggaaatgtgaaccatttaaacaagaactttgtgtttaatgattgctcaaacaagctgataatctggtgggaagaagcactaatgcacaatgactgggttgagcccgcaaaatgcattcttggtggcacatctgttcgagtagatagaaaacacaaagactcacaaatgctgccacaaactccatgcattttatctacaaacaacaacatatatgaatgtgttggcggaaatcatgtttctcatattcattgcaagccactaaaagacagagtcgttcaattgaatttcatgaagactcttccacaaaactttggagaaatctctcaagaggaagttgccggatggcttttaacatgcaaaaacagattcaactgcacactagaaggcttttgtaacgaatggaaaataaagaatgtttccaatgacatgccacttgctaaagtgtgcccatctcattcgcaggacttcgtcttacatgaacagggaacgtgtaccaattgcggtgcttatctccctcttgatattgatcttgaaccttatagctctaataattctggggacgacggacgtaagtaaaactcatcattttttaaagtattttaaaaaaacaaaatatttaatacttattttcttgtggcttattattgcaggcgtccctgattcagaaatcatcggagctcgtagctcaagtcctcgcgctgaccgcgaggaaccagagcgaaagcggataaagcatcaggtactaaaaaaaaatcaagaagattttctaaatgagtggcaatcacagccaagagatgagatcgagctacaaatatacaaccgagaaaggagagagctcttcgggacaccggtcaccacagacaacgagtcctccgaagaggaatcggagcgagagtccggaccggaatcccaagaggagtccgaaactgacattgaatctaagcccaatactaaaaaacaaggaaagaggggaaaaagctcaagggcccagggctcaaaaaaaagtgcagtggggggaagcaaagcattcggagagccaatacaagagaccgtggtctaacaggaaagaaagggatgaatggaaaaaaagagtgagtgttgtggatacatttgttagatacaaagctaaacacaacactgacaaaagcttttgtgggttttactggcattcatggcgtttagcaaagaaaggaacagataaaatttttgatgagatgaaagcagaatttcagggaaaatgcacagatggaaaaattgagtgggcagatgcaagggagatgctgtttaagtttaaaaaagaaatggataaagattacagaagcatgctttggcactttaggtttactgaatgtgaaaaatgtgccttttgggatgaagtgtacaaaaaacacatggctaatgtgcattatgatcctccgcaggaattaagtgatgctgaattgcttgaagctgttgcagaaattgaaaaagcaacagaataaagaatagatgattgtgcttttgatgttcattataagcttaataaaatttgacatatgaatcaagtatttcctgttgttcgaacaactaaaaggggcaaaggacaaggaaataaaaggaaggagccaacagaagatcctcaggaagaaaaaaaaaataccggtgaacttactcttgttggtgaaagagaaaactgcaaaaaaacacaaagacacttttattttgcgcggcaaaatcagggttcaaaaaaggcaaaaatgtcagatcctgctccagaaaatgagcagggaatatctgaagttgacggggcagttggaagatcgggaggaggaggaggagggggtggaggcggagggggagccagcagcggcatagggattgcaacaggcggttgggttggtggaacatattttggaaaacatagggtaattacaaatataacaagacaatggtttgtgccaatatataatggccacaaatacacaaaagaaacagaggcagataattctggcttttggacagggatcaaaactccatggggctactttaacctaaactcgtacagttgccacttttcacctaatgattggcagcggctgctaaacgaatataaaaaatggagaccaaaaaaaatgagagtgcagctatacaatctgcaaataaagcaggtagttcagcttggaacagatacgctgtataataatgacctgacagctggagtgcacataatgtgcgacgggtctcatcagtacccatatgcacaaagtgggtgggatgaagaattgctaccagaacttccaagcacagtatacaaattgcctaactactgctactttcaggaattaggagacataggagacacaaacacagacataagggaagcatggttgggtacagcgtgcccattgttttttttggagaacacatcccatgaggtgctaagaacaggagaagaaacaaatttttcttttgactttgattgtggatgggttcacaatgacagagcattctgtccgccacaatgcgactttaatccagttgtaaaaagcaggcggtacagatttatcatgggagcttcttcaaacacagcagagccatattacaactacaaaaagccatctaattggatgccaggaccaggaacacggctaaatggaaacatgtctggcacaaatgtaaaaacagcaacagggccattcaacacgtcatgggctccaccaggtgtttctcaaacaggatcggacacaacttacctaggtgcaccagcactacccgaaaacagctgggctgcaaaatcaatgccaacagcaccagcaaatgctgcttgcagtcaagtagatccaaccagactgcaatttaatgagccaaatcaacaagggcaaacaggagatgctagcattagatataataacatcagcaatgacatgacaagatggggcacagtatggagtgcttcacaacaaagcggaagcactgcagcccaacaatcaagggttgacactgtttggcaatatcccatgcaagcatggaatgggcaagaaattacgagatatgcaccaatttgggataaacaaccaaacacagacttccacacaacactgtcgtcatctgatggcacaattcccatgaaacacccaccagggaatatttttattaaagtagcaaaaattccaattccaacagattctaacgaagactcatacttaaatatttactgcacaggacaaatttcagttgaaattgaatgggaagcagaacaatacgaaacaaagaactggagaccagagctgagaataacatcatcaaatataggaagaaatatatacaatgtaaatgcagccggaaactacaacacaaatggtgggctatacagcaacatgccaacaagatacggtatgcaaagggtaaactaacccaaaatcatgctataactataaataactataacagcaccaccaggacgccatattatgttttggaaataatatttccaaaactttgtcatctgtgaagcattattaattctatgttaattctatgctaatgttattatgtgatttgtttatgcgcttgtaaaaataaaataaattaatttattttatttttacaagcgcataaacaaatcacataataacattagcatag

SEQ ID NO: 316 - DNA, 4894 bp, Desmodus rotundus dependoparvovirus
  source 1..4894: mol_type = genomic DNA; note = Desmodus rotundus dependoparvovirus - NC_077013
aaaaaaaaaaaaaatttcgtacgaagcgggttcgagcttatccgaacttggcaccgtgccaaccctagctacgtcatcagagtgcgccggaagttggggttaaaagccggatctcaacgaccgcgcttgcgcggtcgttcaatccgccggttttaaccccaacttccggcgcactctgatgacgtagctagggttggcacggtgccaagttcggataagctcgaacccgcttcgtacgaaattttttttttttttgctggcaagttgccaatacgatttggcattttgccaaatccggattagagcgcggaaatgaatttccacaccccctggcacccttcccggcgcctcccgatgacgtaggcccagcgagcgagcgtctagaagcaacacaacaccggagaaggccgtggagcggaacaggcgggaacaaagggcgggaaaagtcgttagggttcaaaatgattggtacccgccaaatgcagcgagtataaagatgggagacttgtactggacagctgcagaacgctgggagtcagacagcagcacgcacggatacagagaaggcgtgatcctgggtaagatgttatttttctacgaactgataatcagactgccaaatgacttagccagggactgcccaggaatgtctgaaacgtgcatggacgccctgctgcattcctcagtggaactgccgcccaaagcggtatgggatatgtccaaagtcaacctaggaatggtgtctatggctcagtgcatagtgcgtattctggtgtgcttctggcagatgttgaatcccctggtggatacgccatactttatccagctagaagagggcaaacagtattaccatctgcattgcctgttaagctggaaagcctgcgatagcctggtcttgggccgctacataaagaaagtcaaagagcgtatcattgaagctgcgttcgggggcatagagccaggcaccacggaatggtttgctgtgcataaaacacgcactgggggcaagaacaaggtcgtggacgccttgtacatagaacgctacttgctcccgaaaaaacagagtgaagttcagtgggcctggacagacataccagaatacaaggacgcagtactagatgcctcccgacgtgcgatgttccaattgcaaatgcctgtggcttgtcttgaggacatgcctggagatcctggtgcggtccccggaccgagcatctcggggtcctcggctgagaattattgcaggttagtagactggttagtgtcagaaggtataaccagtgaacggcagtggctgcagaaagacaagctgtcctaccgaagctttcatgcgaactctaactctagcagacagattaaagccgctctagaaaatgcaaaagctgaaatgctgcttacccgcactgcaggagactatttggtcggggggacgctgcataaccctatagataccaacaagatcttcttgctgttctgcctgaataactatgatccccaagtagctgctaccattttattgaaatggtgccgctgcgaatggggaaagaggaatacagtgtggtttactgggcctgcctcaacagggaaaaccaacctagctgaagcaatcgcgcacgcagtacctttatatggttgcgtgaattggacaaatgagaatttcccctttaatgactgcgtggggaaaatgctaatttggtgggaagaaggcaagatgacagccaaaatagtagagtcagctaaagccatcctaggaggaagtaaagttagggtagatcagaaatgtaaaaatagcatacaggtggatcctacacctgtgatcattactagcaatgtggatatgactttggtgatagatggtaacacgattaccgcggagcacagagagcctctggaacatagaatgtggaaatttacttttgagcatcaactagagcctacctggggtaaaatatgcaaggaggaagtactagacttcttttgctgggcagcagagcggcctgtggaagtagctccgacatactgtgttccgaaggtcgcaggcggtggagtactcccaccccctgaggttgaccttacagaggacatggatgatgaggacataccagccgctcagcagccgatagaagtggactttgctttgtccacagagatcgacggccagcaggtggtggtatctggcccaccgccatcgccggaacccggcacacgctcggttgggacctctacggaggagcctgcacctttgttaagcactactccccctgcggagtctgcaacactgaagagtcctccacgcagtccagatcctcaggagggaccatcttctctcattgctcctcctgctcctaagaaatccaggtatggcacaaggttagtgtgtctggagcataaccaggaagaatgtgaaatatgtggagaggagctatgcttgttcactgcggggtttccaactccagaaacagaggactccagctcgtccacgtctagtgtggacctgcaatgccatgaaaccctgtctgatatgtctgggttatcagatgtgtctcctcctagtccacctactcctgaccctccagtgggctcccctgtccctctgatagacttgtttgatgacatggactatatgcccccctttcgataccaacccgagtaatcctttccttgtagagcagaagagtgaaggcccgacccaaaagaagagagggtgggtttggccaggctacaagtacctcggacctggcaattcccttgacaaaggagagcccgtgaatgctttggacgctgctgctcgtttgcatgatattggatactcccggctacaggaaaaaggtgttaacccttacttgctatactcctcagttgatgctgattttcagtctgctatccagactgacaagtcctttgagggcaatcttgccagaggactcttccagttaaagcgcagacttttccctcacactggtgttgtacctgaggacctgggcaaccaagcaggtgtccaggcggcgggcgctggcgctacctcaggaacagtggagggactcccagcaagctcctctgctaaggtttctaaacgccggggcgacctcgggggtagaggccgcggcgggaagcgcagaaagatcagcatggcagcggaggcaggcgctacaaatgcggaccctccaggagctagcttgggagcaggggctaccaatgccccagacggttggcataacagtgcccgttggggggatgggacggtcaccactgcagccaccagagtctgggtactcccctcctatgacaaccacctctacaaaaaaatctctgaatccacagacagtgcgggagcagataggttcctgggatggagcaccccctggggatacttcgacttcaatagatttcatatcttctggtcccctcgaaactggcagaggttggttaactcctacacgggcttcaagcccctgtccctccgggttaagatacaccagatacagatcaaggaagtcaccgtacaaaatgccaccactcaaatcgccaccagtctctcgtccacggttcaagtcttagctgatgaaggtggagtgcttccttatgttatggcctctgctaatgtgggaacactatcctctttccctaacgatgtcaccatcctccctcagtatgcttacacaacactgcactacaaaggaaaaggcactggagaaagctccttcttttgcctagaaggaatggacagtgtgttactgaaaacaggagatgagatatcttttgagtatcacttcccagatctgccctttcattctatgtttcaagtgggccagtatttacaccaacaaggaaatcccctactagaccagtacctcatgatctgcactggtactgacggtcaaggtcttcccacatatgccaggggtccagctaaaaaatattccaagcaatacaaaaattatctctatggtcctgctgttcagtttaacctcttagctacagacgatgacaaagctaaattgtacaataagaaacaactcactcaagagcagtgggagggcaccaatccccgaacctgggtacatgaccttggatggaataacatgaaacctggcccagccatgtggggatctgaggctggagtggagcctgtcaatgctcaagttctatttgataactccactggcagaacaacaggccaacttcctagggagccttaccgagcagaagagacagagcttacctattctaatgccccaagcaatcgtactccagcacaactagacaacaacgtggcaactcagggagcttctgaggctaacaaggttacacagagcgtcaacactacaggggaaaacacagtccttcatgaaaggggtcttctccccggtatggcatggatggatagggatgtatacctctgtgggcccatttgggggaaaattccacacactgatggaaacattcatcccactcctctgattggtggctttggggtcaaaactcctcctcccatgatccttatcaaaaacacgcccgttcctgctaatccaacccagttctctgataatatatttcgttcctacctgacggaatattccaccggcctcattaccctggagatgacgtgggctgtggaacgttctcctgttccccgctggaatcctgaccttcagttcacctatgcgacttccatggccgaggctgactggttctggcccaatgccacaggaacatatcatgaggggatgcctgtgggtactcgctggcaaactaatcatttgtaagatgtctgagacaataaattccgcctgttccgctccacggccttctccggtgttgtgttgcttctagacgctcgctcgctgggcctacgtcatcgggaggcgccgggaagggtgccagggggtgtggaaat

SEQ ID NO: 317 - DNA, 4425 bp, Avian chapparvovirus
  source 1..4425: mol_type = genomic DNA; note = Avian chapparvovirus - NC_077032
cacgcgcgtgcaaagcacgttaacgttaacgtgttaacacaagccacgcctccggcgccgcctcgcggcggagactatataaactcgtgtattgtaggtgtggttgtggctgtgttgtgtctcagactactatgccaggtggatcagactacaggcgttggtatgctatgcgaaatgctatgcgtgaaagaggtacgtggagggagggggatccgccaactcatagtgttcctgctttagaagaaggtgaacctcctgctcaacgtccaagacaagacgagcctgatacgcctgatagtctgcctcctttagaatcatcgccaacgcctgaaggtaagaatggcgtttgcaaacggcttttctgtacttgcatgggttcgtccagacagtccacttataggtggaactggtgacggttactctgaagatagcaaagctattttaatacgcaatttattacgtgatttctgtattttacttaacattcgttggaacatggattgttccattattacactagatggtgttcaatatgcatacggcaaaaacacacgctttggtgtaagtgaaaaaacccttcgtaatgctattggtgaattagcacagcatattgagtttattcgtagttctcctgaaataaccgctgaagatttacagcgttacaagacatgtcgagcgaaatggaacgttccagatctgatttcggaatcaacctctgggtgggatccacaggatgcagcggggacctcaacaggaatcaagcggaagcgcttttaatcaacaaaccagaatggacaccaacatctgaaacagagacaagacgtcaattagctttacttaatatgaaacaatttcaatgcgccattgttcaaattaatgatcctaatggagaacctatttcaaatcctctcatctatgctctcttatttaaccaactaacaactgtcaattattgggtttgcagtggtgaattcaacaaagacgaaatctttcatgttcatgtcatgctgcaaaccccttcacgttctgattctctacgtcgtagtttttacactgttatgactaaccttaatatttctactaactttcaagagatttttggtcaacaatgtacatttgaatgtttaaaaatagaacgcacacataaaccagaaagtatgttagcatacttattaaaagcacctctttgggtttgtggaaatagagaacatattttgcaattatcatttgatgtacacaatttagatttacctgctagatttagaccacaagaacaagaacaacaaaccatacctgaaatgaatccaatgactgaagaaataattggcgcaataattgaaggaggagctaaaactatggaagatttagtacgtacacatccaggtgtgattgctaaatatttacatagagtaggattagatacgattatcagaaattgtttaatgtatgtcaaggcaacaggcaatgaatggaccttagaaatgtattcaaaagaagatccagatcctagagcaatacatagagtattattacatcaaggaatcgaacccagtaaatttgatgacattttttatacatggctaactaaaaaagacagcaaaaaaaataccatttgtttatatggaccaagtaatacaggcaaaagtgcatttatctcagggttaaaacagttgttaccatggggcgaatgtgtaaatactgcaacatttacttttgaaggtttaattgacagtactattggtgtatgggaagaacctttgatcagtcctgaagttgctgaaaaagcaaaacaaatatttgaaggaatgattactagtattccaatcaaatttaaaaaaccattcaaattacctagaacaccaataataatcactactaatcattatccatggcgtttttgttcacaagaagaaccaatgtttagaaatagaatgtggattatagattggatacatcctgtaaaagattcaccttatatttgcagaacgactgaacatagctgcgaatgcggtcattgcagagcaagccgcggcagcacgtctcctcctagcacaacagaacctagcgagatgtcgagaagagaacaatcctttcctaccagggaggaatcccttcggagtacctacgaaattaatgtgggctccggatccatgtacgacccaagagaaggaactagcaggagcgactacagctcacgcagatgcagtagcagcagcacaagtgagcaatgctccgacagcacaagatctgccctcggctccagccccacaattgagcgattcttgggatacggcagcaacaaatccggccataccggaatccgaattcacagtgccgaatcccagtgtccagaacagctggagtccgacgacagtgatggaaatattagacatgatagctcaggaaatggaagctcaggaagcagggagcagttcaaacgcaagcatagtggaagagatggacactttagaacagaacatcatagcctttcaacaatggtgggcatggggaccagtaaagagaacaaaatgcaaatttcaattcaacccaaaaaacgcaaattggataggaaagtgggttccataaaacacaatccatataacattcctctttatgttcctgataaacaggcttggaaaggatatcttgcatacctctactgctactatggctgacaacgtttctatcagcaatgtatacagtgtatatctcaaaaatcaaccatatatttacccaagtgatcaaacacctgatcaatatactaatattaaaattaatacgggatggaatataattcctaatatgctctggaaacattttgtaacaccacgacaatgggctgaattaataataaacaacgaagcatatcacgtaaactctgtcagttgtactattttcaacatgattcctatgactacacaaatagctattcaaaatacaagtgtcttcacagccttcaacaacactgtatatgcatggggatatacagatgaactatacgaaacatcatgggaaggatgggacaatgttgaagattctatagatcaacgttttatatattgtccaaacttagcatggaaagaaggattaaattacactgtctcatcaaatgacagaaataaactaaacacttggcccgtttacctttggcgtgtacctcatgtacacgtatcatctagacaaacatggggaaatgttgcaacagctggagcaggtgatggagtattttcatgtggcaacaatggaaattgctggccaagtggtgtcttttgggatccattaaacatgccagacaaactaatggaactacgaccaggaaaaaatgccatgcattttacatggaatacacatgactgtgattcacatctatggttcaatttcgatcaaatagcagcttggtggccttggacatcaacaggaccatattcagtaaatactagaccaggacaaattaaactatcatctgattgtgatccagaactaattgcaacatacggacaaggatcactaacatcatcaacattaaattctgcaacagctacaccatgcaacgattacaccgtaccaaatttagcatatcaaccaatagtaccatgtgcatggtggtggaaagaaatgcaaaattcaattattcaagatagatcaacaaacaaagcagatatgtggtttgcaggtacagaattcgaacaagcaaaatatccaccacatcaatggtttacaaaaatagtacccttatatgacagtaatggaacatggattgaagtaactgcacaatgctcagtaaaagtaactataaatatcgatgtaaaaaaaagacgatcagcaatatacgcacctacctggggacctttttcatggagaaacgtatatagcgcacaaacagcatgcctgaatttccaaccagcaatggtcagatacagaacaggaggagccagaagaacatggcaaaatatcgcacaaaccgacggccaaaattggtggcaaacaggacacccaagagaagacccctatgtagcatcaagcacagtagcatcaggttctggaatcgcatcaactgcattaacaatgacaacaacaactgcacctaccaacatagatccaacagcaaaagcaaaaacaaacaccacatttactcgaccggtagcaccaaaacgtcgcgtacaaactgaaaaaccaccttctccaaatcttccaataaacgatttaacctttttcccacatttatcagacactcaattatagcctgtgtctacacacccacatccacttgccaacaaagttgagcaacccgcctcccaacgccaagagagggcagggtgccatgcccggggcactcaggtaccgtacgtgtcgacagatgccccgggcatggcaccctgccctctcttggcgttgggaggcgggttgctcaactttgttggcaag

SEQ ID NO: 318 - DNA, 4642 bp, Avian adeno-associated virus
  source 1..4642: mol_type = genomic DNA; note = Avian adeno-associated virus / Dependoparvovirus avian 1 - NC_077033
agagtgctgttgcctgatgtaaattcttttacactcgccactcgctcattcgtgcaacccctcccaactaccccgcggaccacacccaccgcgaagcggtgggtgtggtcgaatctggcgcctttggcgccagattccgcggggtagttgggaggggttgcacgaatgagcgagtggcgagtgtaaaagaatttacatcaggcaacagcactctgtgtgccagccccgcccggcggccattttgtctcccgagtgagtgagtgagagacgcacgaggaactgagaggtcaaagtcctctctgacgtcacatgacgccacctatcggccgatcctctcgaccaatgggatgacggcactgtctataaagagagaattcctcacatcaccaccactcactcactcgcggacgcgatggaattctacgagatcgtcgtgcaactaccgaacgactactctgtgctctcggacggcttcatagacgccttcacgagcaccgaggtgccgcctgtggccggccattgggacacgaccgtcatcgacaggctcacctggaaggtgggggacgtctttgccgaacagatcgtcgcctgggcgacggccacggccaaggggaagacgccggccttcttcatccaagaggagcagggggaagaatacgtgcatctgcactgctgcatcgagacggtggtctctgccagccacgtcctggggaggtacgtcaacaagctcaaaaacgtgctgtcgggggtgctagaggggtacgtccacaaagacgattggatcacgatcaacaaatcgggaggcgcctacacgaagaacaaggtctgcgacctcaactacatcacattctacctggtggggaagacgcagccggacgtcctctgggcgtggagcaacatcgaccgctaccaagcggcgctgctggacaacgaggagaggaagaggctgctggaagagtacatccgagagaacccaccgaaaaagaaggagctgaaaacgccggtggtcgacaccgccaacgcgcagaaatacatggatctcatcgactggctggtggagaaggggatcaccacggagaagcagtggctgttggaagacaggacgtctttccggtctcaccaggcgggccaggggacggccagacacatcaaagaggcgctcaaggcggcggcccaggagatactgctcaccaaatgcgccaaggactatctggtcgtcaaagaccagacgtacgacgacatagaggacaacaggatctacaggatcatgaaaatgaacggctacgatccacacgtggtcgcggccatcttctcgaggtggtgcaacagagagtacggcaagaggaacaccgtgtggctgcacgggccggcgaccacggggaaaacgaacatcgccgaggccatcgcgcacgcggtgcccttctacgggtgcgtcaactggacgaacgagacctttcccttcaacgactgcgtcaacaagctgatcatctggtgggaggaggggaaaatgacggcgaagaccgtcgaaacggccaaagccatcctcggggggtccaaggtgcgtgtcgatcagaaatgcagaggcagcgaggagctggaaccgacgcccgtgatcatcacgagcaacaccaacatgtgctgggtgatagacggcaacaccaccacgtacgagcacaagacgccgctgcaagagaggatgttcaagctggagctgacgacgcctctgagcccggactttggaaaaatcaccaaaagagaggtgcggcaattcttcagttggggcgccgcctacgaaggcgtgccagaaccggtctttcaggttccaaagacaacgtcgcaagccatcaaaagagcgatgacgtcaacagagcaaagtccgcctctaaaagtccagaaagtagcctctcactcactcactcagaaaccccactggacggaacgcctaccggaggacgtgcacttgcacgcctacaggaagtggaaagcggagagggatcagatccagaaggggggtgttggcacgacgactgcggaggagagcagtgagggggaggggccgttctactacaagcagaagtgctccaagcacctgcacctggaggcgctaaagtaccagtgtctcgaatgctccagggccaattgggagattaacaactgtcgcccccacggggtggcgaactgtaaagagtgctttccaataaacgaaaacgcgtaatggacgtctcggtctctttattccgcgatggcggcggagggggtggtaccagaatggctagagagatttatcaagaggaggatcttcagaccgatagggagcctgtttcacgaggcgaaacagcggggggcggtccttccggggtacaaatacctgggacccttcaacgatttggacaggggggagcccgtcaacgcggcggacgccgccgccctggaacacgacagggcgtacgacgaggagatcaagaaggggaagaacccctatctcacgttcaataaagcggacgaaaaactgatgagagacttaaaagacgacaaatcgctggggggcaacctcgcgaaggctctctttcaagccaagaagcggatagcggaaccgctggggagggtagaactggcaggaaaggacagcatcaaagactactttccggccaggaagaaggcgaagacggggggaggggaaccgccggcgcctcccccgatagaagaaccgaaaggagtaggaggggcggaaaacggaaacgccacaggaggcggagcaggggcggaaggaagtcccgtctctggagcagcatctatcatggcgggtggagctggggcgcctatggcagacaataaccaaggcgccgacggcgtgggcgaatccgcgggaaattggcattgcgattccaaatggatgggagatcacgtcctcacgaccactacgaggacttgggtcctgccgccctacaacaactacctctacagagccatcaccagcaccgggacggacagaaaccaggcatacgcgggattcagcaccccctgggggttcttcgacttcaacaggttccactgccactttagcccgagagactggcagaggctcgtcaacaaccacgtcggattcagacccagagggatgcgggtcaaaatcttcaacatccaggtcaaagaagtcacgatgcaggacaatcagaagacgatcgccaataaccttacgagcacggtgcagatattcgcggacagcgaatacctgctgccctacgtcaacgactgcgcctccgagtcggccctgccgccgttcccggcggacatctaccaggtgccccagtacgggtacctgacgtaccactggcagaacgcgaacaacaacatcgagtacacggacaggagcgccttctactgcttggagtacttcccctccagcatgctcaggacgggaaacaccttcgacttcaccttcgagttcgaggacgtgcccttccacagcagctacgcgcactcgcagttcttggacaggatacacaacccgctgatagaccagtacctgtgggggatatacgaggtgtccaacaagacggccaagtggaaaaagatagacgggagcaactgcgccaaccgatacaggaactggtgcaagggaccgtacgtcagggatcagaggatcagggtctacccgggaggcgccgccaactacacgaccttctccgcctggaacgcaggcgccaaagcgcacatccaagacagggagtacctcttcaggcccgggatatcgggacccgggacggacctgacgaacacctcgcacgtcgcctgcaacaacaacctcaccttcgccaagaagccgcagaacacgccggcgaaccccaccatcgacgacctcatgatcacggacgagtccgagacgctgccgacgaacccggtggtcaccaaagcctggggggcggcggccaacaacgcgcaggacgacgggcacgcccccgccagagaagagatcaacgacataggggtgctgcccggcatgtgctggcagaacagagactgctacctacaggggcccatatgggccaaaatacccgacaccgaaaaccacttcaaccccgcgccccacatggggggcttcggcctcaaaaaaccgcccccgcaaatcttcatcaaacccacgcccgtacccgcggaccccccggcgacgtacagcaacgccaagtggaacagctacatcaatcagtacgccacgggacagatcaccgtcgaaatcgtctgggaagtgcagaaagagagctccaagaggtggaaccccgaaatacagttcaccagcaactttggaaacgccttcaaagaaagcctcaacttcgcccccaacaaagacggcgactacaacgaacccaggctcatcggaacgcgatggctatccaaacacttgtaaaaataaatacaataaaatatacgtaccgttacatcctcattcgtctcagatttcttttgttcctcccactcaatcactcactcgaaggggcaggacggacgatgtagttctcagtcgttcgccagtgagtgaatcacgcatcgaatgggaaaattggaaagttggacccatgcccgggtgagaactacatcgtccgtcctgccccttcgagtgagtgattgagtgggaggaacaaaa

SEQ ID NO: 319 - DNA, 4102 bp, Macaca fascicularis chapparvovirus
  source 1..4102: mol_type = genomic DNA; note = Macaca fascicularis chapparvovirus - NC_077037
atagtaacaggcagtggtacgcggtcagaaacaagctgagacgcgaaggccgctgggatccggacacggacaaggacacgcgccagcggacgctggaagaggtaggcgtgcgggtcccggaacccaagaggccaaggatcgaggaagaggacgacggtcctccaccgctagagggcgaggaaggggatcccgacaaagacaactacgcaggtaagtgacacgtcatttactttcattttagaactaagatggcgggtcagggattcagtatcctgctagaggccatagatcacccagaagactacgaaacagacgaacaaatactagaagacgcggtagcgctcctcaacggcaggtggggactagacgggactgtgataacagacgaggaaggtaaaaagtggggctgggtatactgcaccaggttccaggtaggcacggacaccatccggagagccctgggagaactgacgccggactacatccgcttccaccgcggcgcggcgacgcagacgtcccaacaggccatcaaactggtaaagctgaaaaggagatggagggtgccggacgggtcggaggaaacccagagcggggaggtctccggaagtacctctggacagggtcagcttgtgtggaaaagacagaggttctgagtacctgggccatgtcgagcggggagatagagacacacacagccaacctcaacatgcagacgtggctgggtctggtactggtcatagggaagggagatggcagcgtgctaaatgtagaagatccacgccccatcgccttccttatgagcagcatcaagaacgtgcaggacttcatcgtggtaggagaaagaaacgaagaaggagtgctccacttccacgtcctctgcaagaccctgatgagagcagacagcctgcagagagccatccaaacaaaatgggagagctgcaaactagcagccatggacgacatagaagacccagatccacacatagagatctgcaagtgtcaaaaagctcacagaccctcggcgctggccagctacatgattaaaaacccgctcttcgtctgcggcttcaatccagcaaacctacgctacgtctgctcgctgtactactggaacgcgggtcagaaatacctagagagaaaacaagaagaacacagaagaaaacaaatcctaccgcagcaagtactccaaggaggacacgccatcacaaaagacatcctacaaatcatatacacacacaactgcctcacagcagaagacatattcaaacacgacccagacctcatagtgcaacacctacacaaaccaggattcatgcagataatcaaaaactgcctctccttcgtggaagccacacgaggagaatggtcactgcaacaaaactcacagagatatcaggcagacccaacaatcatacatacgtgcctcagtcaccaaggccttgacatagacgaggtagacttcatattctatcactggatcaacaaatcacacaccaagaaaaacaccatagtgctccagggtcccagcaacacgggcaaatcggccttcatcaggggcctcaggggaatgttcgacacgggcgagatctgcaacgggcagatcttctgcttcgaaggcctggtgggcaaaaagctgggagtctgggaggaaccactgatcagtccagagtcggcagaaaaatgcaaacaggtattcgagggagccaacaccacagtgccctgcaaatacaaaaaacctcaaccactaggaagaacacccataatcatcaccaccaatcacaacctgtggcgctactgcaccgcagaggaaaatccattcaaaaacagatgctggatcctaccctggaaccagtgctgtgatcctccaattctcatccgcagatccagccacccaagctgccaatgcggttgctgcaagggaagcggcggcggcgaggttcctgctgacctcggaacagctagccaaatgccgggaggagaacaacccgtacaaccactggttcctgggtccagcccaggacgtgagctgggcgctggacgcgccggatccgtgcagggaacaatggatccaggcgacacaagctcacgaggagctccagaaagcggaacagaacctctctggctccactacgggttccattccacacgtccaggcgggacaacagagcaacgcaccgacgagccaggacctagcggcggcgccggctccccaactggcaacatcgggggacccagtgggcatcacggacccggccataccggtgtcagaatataccgttccggacccggggatggattccatgtggagcccctcgagcatcgaggacgtgatgatgcagattgcagaagagctggacgcgcaggggatggaagtggaccgacagatcctgaccagcctggacctcatagaggacaacatgagaacctacgcgagatggtggagctggacgccgggcagaagagcgggcatcaagtggaaacccaagaatcagagctgggtggggaagtgggttccctaaagattcccaccatggtggactggtgtaaatacttctcttttctctattcacagttctcctctaaataaacatggccgattccatctcactcggaaacaattacatgtgttattgggacaacagtccttacgtatatggttcgtcagatttcacacaagttaattcactcacttcagtcaacacaggatggcatgtactacccacaatactctggaaacactttctatcaccacgtcaatggtatgaaatgatgatcaactacgaagcctaccatgtagacggttacactgctaccttatataatccaatccctctcacacaaaacctagccatccaagctaccagcaccttcacagcattcaataacaccatatacacactaggagctcaagataccttatacgaaacaagctaccacaactggtgggcagaccctctctggaaaaatttctacgtcgcatacaaagaaggtttcatcaaatatggaactactaccgtaactcaaaaaagactattacttcccacatacctatggggaactccagaccacgatccatatgatacatacacatggtcatgggatccaaacagaccagattacccacaagctacaagcgtgtggccacacacaaacaccggcacaccaaacattgcacatcctacaggcatatactgggatccaatgaccgatccagatagcatactagaactaagaccaggcaaaaactccatgacattcaactggagtgcccatccatgtgatgaaaacatatggttcaatttagacctactagcaaaatacctaccatacgtaccagacggaccatggtcatctgaattacaaacaactacaaccggagaaaccaacagatacggacctgccggagattcaataccaaatccaaacatgagtgacccattcccacaaacatcatacactaccggagcaggacaaaccacaagaccatctcctcaatacaacagcagatacatgggctacagcatgccaaacctactaaatctacctattgttccagtcacatggttctggacagaaatgaatagaaacttaatagaaacacaaagtaccacaaaaccacaattaggatggccaggaacagaatttcaagcatacaaatatcctcccacacaaagctttgtcaaaggaatcccactatttgatgaaaatgacaccctcatacaaacatccacacaaggatgcatacgagtcacactacacctaaaagtcaaaaaaagaagatcaagatactttggacctacatggggaccaatgagctggcaaatgacctcaaccatcaatggcgcattcgtactacccgctgtaagatacagaacaggaggtgcaagaagaggatggcaaaatccaataaaccaaactccaacaacaacagcaccaaccagatgggatccatatacttcatcaacatatacaacaacctcttcatcatcaagattcacaagacctacatatacaacagcaaccatgaaataactgtgtccaatcacacacacagttggtcacccacatccttgtggcctgccacatcctgctacaactccta

SEQ ID NO: 320 - skipped

SEQ ID NO: 321 - DNA, 4231 bp, Duck-associated chapparvovirus 1
  source 1..4231: mol_type = genomic DNA; note = Duck-associated chapparvovirus 1 - NC_077098
gcctggaggtactccagaagacgatccagaagagggcactagcgctagagccagaggtacgtgtatacgttacactttacctgatcatatctcctcagaggccttatggcaggttttggaggctcttccggattcacactcctggtatggtgcgaccgcgactcttggcggttcgaaggcatggatagtcagcaacgccatgatacggaaaaggaactactcgcagacgttattaccttactttgcgggagatgggggatggagggctccattgtggaagatagcggggataccttcgccttttttgtctgtccccgttttgttattagtacagcgacccttactagggctttaggtacattggctggcactatgaaattccacaggggatctgcaacggataactggaagctactcgtcgagtacagaaaatgtctgctcaagtacgatgttccagacaaggtgtccgaaggctcctttggagagggattcgaggggagtcaatcgggacatgcctggagtcagccagccaagagggctcggaaataatgcaagacaaagagcacgtagccagacctatgccggttatagaagtagagcaaaagcttatgaacatgcgtacttatattggtggtgtgattatgctcacagatggggatggaaatgtaatcgaagatgttgttatatatgcaaatctactaaataacatgcattgtaatgaagattggttgattattggtgaagaaaataaagatcgcatatttcatgtgcatacattggctcgtactggtgttcgaacagattcatatagacgtacacaagaatccatttggagtactatcaaaacacatcctattatgatagctcaatatggcagtgcaacatgtgacatgttgaaatgccaaaaagcacacaaaccatgggcactcatggaatacatgtgtaaaaacccaatatggatatgttcgaactctgatgctcttttacaagcgacctatgatattgacacatggaatatgtgtgccaggttccgaggtacagaagagattaaacctgacatagataaggctaatccaatgatacaagagatgttacaaataatcatggaacacaactgtaaatcattagaggatgtttgtaagaaagctccagatgtggttgtgaaacatctacataaacccggattcgctagcattgttgctaactgtctgacgtacagcaaatgtaccggacgcgtatggaagctcagccaatatggatccgtggtttctgatccttcttatatccactgcattctcttgcatcaaggaattaacccaactgattttgattatattttttggcaatggattactaaaaggcacgcaaaacggaacacaatccacatctttggaccttcgaacacaggaaaatctagcctattcgtaggacttggaaagtgttgtccaggaggtgagatcgttaatggtaacaattttaattttgaagggttaattgaacaatactggggaaaatgggaagaaccgttatgttcaccagaaatagcagaaaaatgcaaacagatatttgaaggaatggaatgtgctatccaggtaaaatttaaaaaaccgtatatgttaccaagaacaccaatcattattacaacaaatagcatgatctggcattggtgtcaaaatcaagaaggaccatttagaaatcgcatgtggttctttgatttcgaatatgatatgtctgatggtatctttgttcctagatgcattgaatcaagctgtaaatgccgcagttgctgcatcagtcggggtgggacgcctagtgctagcagctcaacaacttcaggattgcagagaacaaaacaatcctcacaaaagcagctggctaccgggaatgccagcacagaatctacaatgggcgacagatccatgtcagaaagagcaggaacaagtagacaatctgatgaaacagagtgcagcggaagggaatcaagtagctacgcaacagctagggggtgcaccagcaccacaactagcggaggcaacggatccagtggggaacacggatccagcagtaccacagtcggaatatgtagttccagtaccgggagctcagaacagctggagcccgatactaccggaggatgcactagacgcaatcctcatggaatacaacgaggagggggggccatgggacgaggagatggtagacgatattctagatatgatgaggtatttcctactatggtgtccatggggggggccaggccgaaaaaacctaaaatggcggtttcagtacaatccagcgaacagcgattgggcgggaagatggataccatgaaaatacctgataaagctgaatgggctgcttacctatcttatatctatcataggtacgaaaacgccgttgaaaaacctgatttgtttgcatacgaggaattagacgaagaagtatcagaatgagtagaacaatcacatttaacaatgtgtacatgacgtacattgataatgctttctttcaatatcctagcatagatgtagaaacaataatcataggaacacatcctaaagcagaattcattaacactggatggcacataattcctaatttcttatggcgacatgtactaacacctagacaatgggctgcttttgtaacagaatgtgaagcatatcaaataaaaagcatccatggaactgtatataatccaataccaattacaacaaatctatcattacaacgtgttaatctgttttctgcattcaacaattgtacgtatgcaatgacattttctgataaaatgtatgaaacatcatggtttccatggtatgatctaccaagaaataaacaattacatttagcattgaaagaaggtgtcatatggactggtaatatgcaatcctcatctggcagtacacaacacacatatgaaagataccaatggcccatctatcaatggcaaagaccaaacatgaaaacaatatttgataatgtttggagccaaggaaaaacaggaggaaatggtgtatataatgtagatgcaacaacaaatgaagcagatcctaaattagcagtacctagcggtgtgttctgggatccatttaactgtccagatgacataggagaactacgagcaggaaaaaatgcaatagactttaaatggacaacagcatcatgtgatgaaggaaaatggtacaatttagatcaaatagcacaattttctacatggacaacagatggaccatactgtggagtaggacgaccatatgaactatttaacacaacaaaaatggatcctgcatttgcatgtacatatggactagcagaagcaaatgcaacagattcaacacatccatcaggtgtagttgcatacgaagactacacaataccaaacatggctaatatgccaattgtaccaacaaaatggttctggaaagaaatagaaaattctatcatagactgggatgaaagcacaggaaacacagcagatgctattccattttatagaaaagcaaataaatactgggcaggcacagaatgggaatgttacacatatccaccatgtcaatggttcataaaaggaataccattatgtgatgcaaacaatgatcaaatcagaacaacaacacaagtatcatttagaataagcatcacattagaaggcaaaataagacgatctgcatattatgcaccaacacatggaccatggtcaggagaacaattatacacagcaacaaataaacgagcaatattccaaccagcatgcatcagatatagaacagctggaagacgaagaacatggcaaaacatgcaaacaaaagagaaatttgctactgcaaatggaggagaccaaacatatgtaaacaaacaaaatttaattgattatccacgacaagatccatacatctgggaattcaacaaacggatagacaccatggtctacaacaatgatcatcatccagtaggaataccagatagagcaggagcaaacagaatgtttcaaccagcaattaaagtcaaatggacaaaagacacagataccacagaaataataatggaagaagaagaaccagaaaaacgaccagaaccaacaccaagaaaatctggaagcatatcaaaattgctgcagctacattaactgtgtcgtactgtccacatccacacaaatttgctctggcaccgtctaaataaacatttaaaaccacactcggggccggtcctttattgcgtaacgcggccg

SEQ ID NO: 322 - DNA, 4087 bp, Duck-associated chapparvovirus 2
  source 1..4087: mol_type = genomic DNA; note = Duck-associated chapparvovirus 2 - NC_077099
ctctaacatcttgtattgttacagaggccttatggcaggctttggaggcagttccggattcacactcttggtatggtgcgaccgcgactcttggcggttcgaaggcatggatagtcagcaacgccatgatacggaaaaggaattactctcagacgttattaccttgctttgtgggagatgggggatggagggctccattgtggaagatagcggggataccttcgccttttttgtctgtccccgttttgttattagtacagcgacccttactagggctttaggtacactggctggtactatgaaattccacaggggatctgctactgataactggaagctcctcgtggaatacagaaaatgtctgctcaagtacgatgtcccagacaaggtgtccgaaggctcctttggagagggattcgaggggagtcagtcgggacatgcctggagtcagccagccaagagggctcggaaatagctcaagaaaaagattatgtggccagacctataccggttatagaagtagagcaaaagcttatgaacatgcgtacttatattggtggtgtgattatgctcacagatggggatggaaatgtaatcgaagattttgttatatatgcaaatctgttgaataacatgcattgtaatgatgattggcttgcaattggtgaagaaaataaagatcgcatattccatgtacacacgcttgcgcgtactggtgttcgaacagattcatacagacgtacacaagaatcagtttggagtacaatcaaaacacacccaacaatgatagctcaatatggcaatgcaacatgtgacatgcttaaatgccaaaaagcacacaaaccatgggcactcatggaatacatgtgcaaacaaccaagatggatctgttcgaactcagatgcactgttacaagcgacctatgatattgacacatgggatatgtgtgctaggtttcgacattctgacgatccgaaacctgacatagataaggctaatccaatgatacaagagattttacaggtcataatggaacacaactgtaaatcattagaagatgtttgcaaaaaagcaccagaggtcgttgtgaaacatctacataaagccggatttgccagtattgttgctaactgcctgacgtacagcaaatgcaccactcgtgtatggagcttaaaacaatatggatgcttggtacctgatcctactagtatccacgctattctcttgcatcaaggaatccgtccttctcactttgattatatattttggcaatggattactaaaaggcatgcaaaacggaacacaatccacatctttggaccatcgaatacaggcaaatccagctttttcgcaggactaggtaaatgctgtccaggtggagagatcgtcaatggtaactcatttaattttgaggggttgattgaatgttattgggggaaatgggaagaaccattatgttcaccagaaatagcagaaaaatgtaagcaggtatttgaaggtatggaatgtgcaattccagtgaaattcaaaaaaccatatatgttaccaagaacaccaattgcaattacaacaaatagcatgatatggcattggtgtcaaaatcaagaaggaccattcagaaatcgtatgtggttttttgattttctgtatgatatgtctgatggtatatttcgtcctagatgctctgaatcaagctgtgaatgccgcagttgcgcattcagtcggggtgggacggctggtgctagctgctcaacaactacaagattgcagagaacaaaacaatccacacagaaacagctggctaccgggcatgccagctcagaatctgcaatgggcagcggatccatgtcagaaagagcaggaccaagtagacgagttgatgaaacagagtgcagcagcagggaatcaagtagctacacagcaactagggggagcaccagcaccacagttagcggaaagcacggatccagtggggaacacggatccagcaataccaatgtcagaatatgtagtaccacaggtgggagcacagaatccatggagcccagtacttccggaagatgcattagaagcgattctgatggagtatcaggatcaggaacctccggaagacatgatactagacgaaattctggagatgatgagatactttctactgtggtgtccatgggggggaccaggccgaaaaaacctaaaatggcggtttcggtacaatccgaacaacagcgattgggcgggaaaatggataccatgaaagtaccagataaaggtgaatggtctgcttacttatgttttatctatcatagatacgaacgagctgtagaaaaacctgatttgtttgcatatgaagaaatagacgacgaattgtcagaatgagccgaacaataaaattcagcaatgtatacatgacctacatagacaatgctttcttcaaatatccaagcatagaagtagaaacaataattctaggaacacataaacaagcagaatacattaatacgggatggcacattgtacctaattttctttggagacatgtaattacaccaagacaatgggcacaattagtcatggaatgtgaagcatatcaagtaaaatcaatacatggaacaatatacaatccaataccaattactacaaatctttctctacaacgtgtaaacctcttttctgctttcaataattgtacctatgctatgacctacacagataaaatgtatgaaacctcattctttccgtggtttgaattacctgtacataaacgattgcatctagcacaaaaagaaggtgttatatggacaggtgccatgacacaagaaagtagtggatcagtaacagatcacaaatattcacggtatcaatggccaatatatcaatggcaacgaccagcaatgaaaacaatatttgataacacatggtcacaaggaaaaacaggaggaaatggtgtctacaatgtagatgctacagtagatgaatcaaatccaaaattggcaataccgggtggtgtgttctgggatccatttaattgtccagatgacattggagaattacgagcaggcaaaaatgcaatagatttctcatggtccacagcagaatgtgacaaaggaaaatggtacaatttagaccaaatggtacaatatacaacatggtcaacagatggaccatactgtggtgtaggacgaccacaagaaatgtttaacacaacaaaaatggatccagcatatgcaacaacatacggactagcagaagcatctgctacagatccaacacatggatcaggggtgctagcatatgaagattacactattccaaattatgcaaatctaccaatagtaccaacaaaatggttctggaaagaaatagaaaaatccataatagatatggaccaaacaacaggaaaaaacacagcaataccgttttatagaaaagcaaacaaatattggtcaggaacagaatgggaatgctacacatatccaccatgtcaatggtttgtaaaaggcataccattatgtgatgctaatgatgaccagattagaactacaacacaagtgtcattccgtatatccatagaactagaaggacgaataagacgatcagcatactatgcaccaacacacggaccatggtctggagaacaactatacacacatacaaacaaacgagctatctttcaaccagcatgcatcagatacaaaacaggaggaagaagaagaacatggcaaaacatgcaaacaccaatgttatcaagcacaggagatgtcacaaacacaaataaatcaaacctcacagaacatgcaagacaagatggatacatatgggaattcaacaaacaactggcagctatgtgttacaacaatgatcatcatccagcaggaataccagatcatgcttcacacaacagaatgtatcagccaagcatcaaagtaaaatggacaaaagatacagacagcacagaaatcataatggaagaagacgaaaacgacgaakatgaaataccaaaaccaacaccaagaaaagcaagctcaatatcaaaactgctaaatctgcattgactgtgtctctacaatacacatccacacggtattga

SEQ ID NO: 323 - DNA, 5194 bp, Equine protoparvovirus
  source 1..5194: mol_type = genomic DNA; note = Equine protoparvovirus - NC_077112
gtgctccttcggagttctcctggttggttgctctattagaaaataaactgaagcgggaaattcaaactaggcggggcctatataagcatataagccagttagcagtaggcagtcatgcaactgttctggctccagctcctgttcgctctgacaatagtggctctctacatctacgccgaagcctttgactgcgcaccttacaaaaggaaaagcctggtgcacagaaacatctgctacaaggaagacaacaccaaatactggtgtcctaacctctgcgagctgtaatggcacaggcacaagtagatgcttacatggatatggagactgaagacgcctactccaagctacaagaccagcgagacaaacaatgtctcagctttgtcttcagtgtacctcagactaccttggttagtcaagaaggtacaccacaggagacaagaacagatgtacactggccatctttctgcaagcaaccaactgaccaaccactcagagaagtcatcaagaacaaccaagaggagctgactaccagagaagaggatgcaggggaaccaatggagatggatgaaatcatagaaaggtcagcagcttttcttatggggaatgttcaaagagccatgttcgagctattccaaagtaaagggtgggagccagagtcactcacttggttcttacaagtggagttcagcagagacaagaaactacattgtcacatgctgcttcaccatgaagagctcaagtcagtgcaaggcaaatggatacagaaattcctggctgaaaaatggagcaagtacatgctaatgtgctgcagccaaaagctagggctagaagaaagaatcaccatgagaagacaactagaatttcatggggtcgacctactaacctacaaacacaagcagacaagaaaggcctactgcagaacagtggactttctggagatgcttagtaggtacttcctaaagaaaaagccagtcaatgaagacaaagagcaatttggcttcatcctctctgcagacaacactctgtcaatcaatggcctaacctactctctgcgcctgggactggcacagcgcctggaacgcctgctagcttccaaacgcaaggcagaccaatctgggagcacaggagatgttgcagccactgtgatcacagcacaggagaayaagaaacggagagtggagacagccaaggaagtgaacatcaaagacacagtgagtactctctttgatgctcgggtctgcagtgaggaagagtggatgctgaaagattcagacagctacatccacttcatcagtcaaccaggcggggaagcgctggtgaagaacatactcaacattgccacactcaggctgagcagagagatgacagcctacatgttgattgcagagaaggcacctaccatctacacagagcaggaattcaaggacacaaaagtctatagaatctttgagagaaacaacatgaatccactcaaagtaatccaagcaatcatgtgctgtctcaacaggcaactgggaaagcagaacaccatactgtttcacggtccagcaactacaggaaagtctatcattgctcaaactctgtgcaagctggtaggtaacacaggctgctacaatcctgctaaccagaacttcccttttaatgactgtactaacaagaatgtcatctgggtggaagaagctggaaatcttgggcctcaagtcaatcagttcaaggcactgatgagtgggcaaacagtgagaattgaccagaagggaaaaggcagcaaacctattgaaccaactccactggtcatgacaaccaatgaaaacattgaccaagtgagaataggttgtgagctaaggccagaacatagtgagcccatcagagaccgctgtgtaaacatctacctctggcacaagctgccaggaacctttggcctgatagatgacgaagagtggccaagaatcttcaagaccatggaaagtcaagactaccaaccaactatggccagttactgtgctaaatggggaacaactccaacctgggcggagcagtggggggatccagctataaaagagcctctcttcacaggctccgagacctctctcttgaagacaccagaagaccaagagagcgagctggacgcggccctggcagagctcctgaacaacctggacactggcacagtggctggcttcccagaaacgctgccagaagaggggctggtgactactcactcttcgacaggcggcgctgatggcacctccgaacaggcctagaaaaggtgagtatttctttaagactttgcttgaaaagggcgcgcgcgggagggaaaccacaaacagacaggatgcaactgttagagctgcttctctggcttgatctgctgatggtggcgggaacagtctgtctgctcgttacatggctgacctttcttgcttccttttctacttggatctgggtgcagtcgcacctgggttgatgctaccgaaccacgatatagtagtggttctctggctttggtaccaggtcgacacagacggaccagagaccaacgtccactacacacttgggacgcactgaaatggctattctctgggctggagctgctccggcgctgctggggctcctcgtcgctggagcggtcttcttctacatgctgctcacttgcctgtgcactctctgcaatggatctaacaaccatctcaacctgtccagactcgcgccgggcagacagctcttctaccacaactactttccactcctgctcctcatgatggtcatcatcatgatctgggccatcttcgtctggctctacttctatccgccaggtcagtgggttagttggacagaattctgtaagctggctaatctgagctcttgttctgggccaggctaggttggacgttgccgggatacaattacctgggaccaggtaacagcctcgacaacggaccaccaagcaacccatctgacgctgcagcagaaacgcatgacaaggcatacagccaatatctagcaaaaggagaaaatccatacttcactttcaacaaggcagacgtgaactttatcagagacactgctggagcaggagactggggcggcaaatttggcaactgggtcttcagggtcaagcaacacattgctcctcatcataaagacgttactgcccatcacaaaggtgctgcaggcagtagtctggcttcacggactggccggaagcgtccacctcctcctagacacgttttcatcaacctcgccaaaaagaaaaaggggtccgggcagaaacggccgaggccgccagacgacccagacgagggaccgtccagaggaggtggagccatggatggtggcggaggagaagaacccatggaacagggagaagggcgagcagcacctcaacaggtaccaagaggcggtggcggagcaggcggcgtgggagtcagtactggagactacatcaaccgcacagaatggcactggggtgagggacatgtcaccatcacctgctatgccactaggttggtccatctaaatgctccagaaactgaaaactacagagcagtgggagtccacgggggagaccacctaccaggcagacatcaacaggatgactttcacagacagatggtcactccctggaaccacattgactgtaatgcctggggagtgtggctgagtcctgcagactggcaaaacttggtgtgtttctgtgactctgtaacagctgtctctttggaacaaaaagtcttcaatgtggcagtgaagacagtccatgagacaaacataagtggccaaccaaccaaggtctataacaatgacctgacagctacaatcatgatagctgaagacagcaataacagcctgccatatacacctcaagccatgcgatgccagacactgggctttctaccctggagaccctgcaaccttccaacatacagatattacctaccatccaaatctaaatttccagcaagaggaacagcaacacctcaaggacagatgacctatggacaatgggtaatagatgactatccattctttactgtagagacactctgtaacattgacatgttgagaactggagatgaatggcaagcaggccactacacctttgactgtgactcaatgcctctctatgtacactggcaaggaaccaggcaactgggagctcctccagcaatcaacctaccacagactgcagacgccgcaggctcagtgaaacatgacacaggcaactactggggcaacatagacaaagcccatgaatccatcatgaggagacccttcaacgcaacctaccaatttccaagatgggcctgggtaaacgaggcacaaggacaatgtatccatccaccgccaaacgcaaccagaaatgccttctatggccttgatcaaacagatgaagatcaaggaaatgacaaatacagatatgacaactgccacggagccccaacaagagcaaacgagctgaacaactggttccaagaaccagaaaggcaaatcacaggcaatgtacaaagaggaaactcagcagtccaataccagaatctaaacaaccaactacctggaccaggagggatcgccttcggagaaccatcacagtgcatgaataccttcagtgtctactcagcagcagacaaacctgtgcagacctatccttggggacaaatctgggacaagagaccgacaactgactacaagccagcatttcagcaagctgccatggtctgtcacagtaatcctccaggacaaattctagtcagagtgtctccaaatctaacaaatgacttcatagacaccacaccaaccaacaaccaagcaagaatcctgacctacagcaatttctactggcaaggaaaactagtcttgaaagcatccattagacctattagtcaatggaacatctaccattttccgcttctagacaacacaaaacaatatataccagacgctctgggagaccactctatgccatcaatggactccagatacctgcctcgtcatatgtattagtgatagtcagttagtgaaactcaaacgagtgagagagctagaagaccctgtctggatcacccgggggcactaggatttttagggctagcttgcttgcttgctttttcagcttctgtagctcacagggacagctaaataaaactgcggttaacctcatcctcttgtcagtgtcttatttgaaaccaaccatgta

SEQ ID NO: 324 - DNA, 4772 bp, Newlavirus
  source 1..4772: mol_type = genomic DNA; note = Newlavirus  - NC_077148
gctctagagcgggagatttgaactggaggctttataactaccagtaggcctcactcactaactaaccatggctcaagcatctctggagatggaggtggctgagactgtgtccttctacaaagatcaagaagataagctgaccttgagctttgtcttcaagacccatgaaggctctctgaaagaacatggacatgaagagaaggaacttggttggtcagtctggactagacaacctgcaggcaatgatactcacagacaggtgagaaagaacatccaagatgaactagatcttgctgataaggaaaatggagaagaagtggatataccatctatacttcaagagaatgtaagtaaccagctggcctgtgtacagcaagctctttttgatctctttcaagctaaaggctggactccagacacagtaaaatggtttattcaggtagagtggggaagagatactcacctgcacacacatgtgcttgtacaccatcctgaacttaaacctgtgatggggaagtggctactcaaattcctaagagaaagatgggccagaaatatggttgcttgctacaaggatcctttagacatgacagaaaaaattacactcagaagagccattgaaaataatgagtgggttcaaatactcacttataaacatagaagcaccagaaaagaatataccaagtgcgtgaactttacagagcttgtggctaattacttcctgcagaaaccaccagtgaagcagacagttactgatcaaggtcctgatatgaaacctggttacattatgtctctagacagtgcctttaagatcaatggcaagtcttttaacaccagaaaacttatagccaaaaaactgagagaaattgatcaacctagagacattgaaatagacaccatgaaacctcaagatgctaaaagaagacgtgtagaaacacaaaaagagataaccatcaaagagacatgctctaaactatataacctgagagtagttactgtggaagattggatgcttgaagaccctgactcatacatacaccatgtctctcaagcaggaggagaacagatagtgaagaacatactatccatagcagctctcagactctctagatttatgactgcttttgatcttatcttagagaaacctcaccagaaggtgagagacattaaagatcttaaagtctataaaatctttgcttctaatggctacaatccatacaaagtactccatgctatgatgtgttgtctcaacaaagaaagtggcaagagaaataccatctacttcaatggtcctgcaagtaccggcaagtctctacttgctcaaacactttgtaacctggtgggcaatgtaggctgctacaatccagctaatgtaaactttccatttaatgactgtaccagcaagaacattatctgggtggaagaatgtggaaactttggccagcaagtaaaccaattcaaagctgtttgctcagggcaatccattagaattgatcagaaaggtaaaggctctcaaagtattgaacctacacctgtagtacttactaccaatgaagctattgaacaggtgagagtaggctgtgaactgagacctgaacatacgcaaccaattaaagatagaatggtaaacatcagactccattaccgtcttcctggtgattttggcctcattgacaaacatgaatatgcaactgccttcaattggatggtcagcaagggctacaaaccaaccatggctagttacacccatcactggggcaatgtgcctgactgggcggagaactgggctgagccgtctataaaagagttcgaagttccaggaagctcttcagaaccatctgacgaagacctcgcagcaagtgacctactggagaagctcctcggagagtgggaaccagacgaacaggaaacttctggttaaccacatgggagtcattggaagaccacgagacggttagttactatggcaacctttacttcctctttagactctcacgaacatgtctcttttaattcttttacttgtggtaataattctactgcttgtgccttgtaatgcctgaagctcctttacctggtccggtaagaaccggagggagaatcattatacatcaagaggctcaacaaccagagactcttactgacttgctttatagagctaatagatgggactgggaacatggtttggttgaattgagctctgactctgactcggacgagccagacgtggactctgactttgaatttgaccaacaagaccaagtagtgcctggctaacatggctgactactcaccattcatctttgagctgcatccaggctacttaactgaaacagctgatccagctaatccaggcaactatatagtcattgttctgttcatctggaacagcggctaacaaccaaccatgcaacttgactccgcaggctagtgacgggacgcttgctctatcgcaggctgggtgccaccaggctacaaatacttagggcctggtaactcacttgataaaggcacaccaagtaatccttcagacgctgccgctcaacgccacgatcacgcttatagcgcttaccaagcagcaggcttcaatccttatttctatcacaaccaagctgatgaaaacttcataagagacactgaccaagcacccgactggggtggcagatttggcaacgctgtcttccgtgctaagaggcttcttgcgcctcgcttggactcctctactgaaacatccgcgaagggtcctgtggggtctcgtcgtgctgggagcctggctgggggcaagcgaaagagaccaccggagagaatctggtggaatctcgcgaaaaagtccaaaggccgtggagctaaaagaccagcacctaacgacccaggagaaggacctagcggcgtcaagcacgcacgccaactaggagaaccaagcatggacaatggcggaggcgagccaatggaacctgagcctacagctacatcgggaggcggaggagggatggggggaggtggaggtggtggtgggagccatcgagggggtgttggttttagtactggcaattttgacaatcgtacgctttggcattttgacgggtctgagatcacaatcacatgttatgcgtctagactagttcacctaaaccaagttaaaaacccagaatatagatgctttgatatgcaacaaactcaaaaacctaataaaggaagtctttgggatgatgactatcatgctcaatgtctaactccttggtcaattattgactcaaacgcctggggagtatggatgacaccagcagacttccaacacatggtttgttttaccaaagacattagaatacacagctttgaacaaaaaatcaacaacatagttatcaaaactgtttcagaaggacctccaccagacaaactcaaaacatacaataatgacctaactgcactcatgttagttgctgaagaccataataacaccatgccatttacaccaatggttatgagacaagaaacacttggttttgttccttggagaccatgtaacattccactttacagatactacttaccatctattagatactttacaccagccggacaaccaactaatccaccacaagcaacacaaccagttgaaggagtaattagcagataccaaaaaaaagaagtagctctcataacaatagaaaatatgcttgaagtagaaatgctcagaacaggagatgactatagtacaggtattttttactttgactgtgaaccaatgccaacacattaccatgtacaatccactagaatgcttggtgcaccgccaaaaacaaatgatccaactactcacaactttcaaggatcagtagaacctgcagaaaaaaacaaaagacaaggctgggcctacagtaaaatgacagatggtggctttacagaagcaaccacattaagaccatttcaagtaggtcacactgcacctgaatggtgctttgcaggagaaagagcaggaccagctattcaaccagctttaccagctgaagcatggccacaagacactgactcaccagatgcaccaacctttactaacatgcttaccaaaactcaatatgacgttagacatggtggtaactggagtattgaagtacctaaccaaaatctaggtcatggagttaacagatacatggatccacacgactcactagccaaccaactaagaatgcgagacaaaagctgggttcaaccagacctaacaccagaaacaccagttcaagctgtagatggtaaaatcatgaatggtccaaaaaccatgaacacacttaacacctacggaccatttgcagcagaagacaaaccaggtgccttttatccatggggcatgatctgggacaaacaaccaactacagatctaaaacctagaatgcacacacaagctccatttgtatgtaaaaccaatgtaccaggtcaactctttgttaaactaggattaaaccttactgaccaatacaatgacacaattccagtagatcataatccatctattgtaacatttgctgatttttactggactggtaaattagtatttaaagctaaacctagagttccacatcaaacaaactttcaatttttctatcatgcagcagactttgaacatggtattcctgatgctattggccaatttggtattcctaagttacttagtagacaaatacctaaatacatgtattaaaaaaatactctgtaacttacttggtatattgtatgctttgaataaacttcaataaagatattatcaaacctaacaa

SEQ ID NO: 325 - DNA, 4322 bp, Parvovirinae sp.
  source 1..4322: mol_type = genomic DNA; note = Parvovirinae sp. - NC_077156
agataccgcagagactgtgagaacaggaagtgtggtactttcccgtgggtgatgttttacaaccatcatccctaaggttataaagataatactttttattatagtacttttttccgtgggagcgatgatagatataaatttttattacctttttgttgtacttaaggggctcgggatagggatagagtcagtgcggtggcgccactccaggtaggaatagagagtgttaaccaatactgtgctcaagctaatgccctcttttcctacaggtaatgggtgctggtctcggtatcatctttgctgctgctccagttattatcggtctattggaaccagttgttgctgagggagttgcttttggttttgacatcttcttggacgtcttggaagctgcgcagcaggtgcacaaggcgtatcaggctacttcgactgtgatttctgcgctacaagggctgaaacgcaagagagaataagtatgtcttatcgtatttcccaagatggttacaaatgttcccactatcatacctttgttgtccagttgggtaactctagtgacttgagacatttagtgaacaattggtcccaatttcactatcctgaaacagatgattattatgatagtggtgctgttcccatgaaaccgggaggtggtggctgggctagggagttatatcccagtgaagaagatttaattaatcttcgagtgtgtggcaatgtgatgcggggtattttgagatgtcacttggacccttatgtccctgaccaggtgttcatttctcttgaaaagggcatagaccatcacatgcatgtgatcatcccgatgatggtttacaaggaagatgggggcatgtctgaaacaaaagtgccttatattttaagggacgttgtgaagaacatcaatggcaatatacaggagtggtttagtaatagtggcttgccctttacaaccaaaactgtgcaatggaaaagaaaaccaaatggtactcatcaatctgtcaatctcttacagttcatctatgagtactttagcaagaaacctacaatgcgcgctaccgctgggggtttaatggggagtcagacctttatgggtgaggatttggtggatgaggctgtggcttttaatctggctaaaaaagagcagctggactatactgttccaaagctgatggcaagtaccacaactaacgctcaagagtacaagcaatatctgagttattgtatagataatggtatctgtacaaacgaagggatgaaggcagaccctttctgccgcaatctctatgagaacaagcaatgtaacccgagcgggatggtgtggctgaaaaagttgatggaggaggtggccaatagtttgagcagagctcatacactggcttggtacattacccaaaagtttcaatatgagctttttgggactcctgattgtgtgtttacccgcatctggagattaaatggcctaaatgctgacactgtgtgtgctatgttgtacaaatgggctaatcatcaaacaggaaagaaaaactctctggtgttggttgggcctcccagtacagggaaaactctcctggccagcaccttggctgatctctctccaagtacagggatggtgaacaaaaacaatatgaactttcccttttgtgcttgtgacagcagaactttaatttggatggaggaagggcgtttaacagaggaaatgattgatgactggaaaggagtgacaggcggaacaaagataagagttgataagaagggagtgaacacacaagtccctatttacagaacaccattagtgtggacaaccaatgaggacccatttatggtttactctgggaactcaatgtcagtgagacaccaacaagctctctctgaaagatatatcgtgatgccactcaccaaaatcttagatgggaaagcgtgggaagaaattgggtggacttaccctactggaccagaggcttttgctgctcttgctgcttgtatgaagtggggacagttgatttccaagggaaaagatattaagtggtgggagctcaggcagcctgatccaactgctgttcaactttgccaggtatgtccggaccaagcaagcgcaatatccatttcatcaataaggctcgtgctaactcagctggtgctccagatgctggcgctggcggaggaggaggagggaccggtcccgggaaccccggctcgagttcgcgctccagctccggacccgggaagtccgctcggaaacgcggagctcctgaagcggaagagaccggacacgccactcccaacaaaaaggcgtttggtcccgataacaaccccgggcgagacaacgaagtgggagatgcagaccgtgaccccggtgaaggaggaagcggaggtgaaggaggaggagccggacctctcgctgctccaaccgaaggaggaggaggaggtggaataacaaagatgatgagtgcaggggtaaacacttttacaccttatgatgatggttttgaagtcactaaaacaattaatgtggccttacccagtccggtgattgatgtgtacaaagtgacaaatggtataagtagaacacaacagttttctgtcatgcatactgattggaacttgctagattggaatgatttccctagtgtgttagatcaagatatgttgagttacattgttaacacttacactgagtggagccctgtggaatatggtgttatgttggatgggttgagagttaccactagagtgactcttgggtctaacactacctatgctctggaccctagtggtacggtggatgttgccattagagagagagggtctatcccttggatgatgtggggaagcagaagaaagatagatggtgtgacacatgaacggtggataggtagagaaccttggaagtactccctgcctcctaaatatggttacataatggactggggtcactcaactgaccgtttgcaagaacctatctatgtggtagagaggggtgtggttttgcgcatgggaagtactgacacaatgacctttggtggtcattttggagaatctacatccatcactaacaggataatcagggggtttctgactgaccctattaactgttatatgccaaagaaccatactgaaatggctaccattatggcacagctgtgggtgggtgacttaccttttcacccaatggctcaagctgtgggagatttaacaactgaaataccggtgcgaaagggaacatctaagcaacagcgcatgtaccaacagcctttccctgctaactcaactgatgaagttatccctgatgttaagtatgataggatgatgaactgtgagagtatcgctactcacattggaggagatgctggtgggcagactcctggcgatgttaacagacacgtgactgacccgtttgaggcaaggcctaatttaaagagcatgagatgggttgggggtggaagtggtaactatcctaacatgttgatgcctattgtggtgcctaaacctatggagtgcactgtgcatcatacacgcttatcaaactcttgtgttgtggatcagcccccaccacaaattttggtgcgcttgagacctgttgtgattgacactgacaccttgctgaaccaaacagctaccttgcagatgaagctccacattaagtggcgagctaaaaagattatgaagaattggcatgatttgcacaccgctcctgtctgggtatcgcctgaagagggatatcattatacacctgactctggtctggctcctttgaccttgcgcccacctgttgggcctactgctttacctggtcacattggtaactctgctcctcttttctagctgcaactggggccaagtgttctgcatgtaacgttcgggatcatgattgacccaactgttggaactataaagcaagtgcgaaccttagaacatatgtactctttctttaatgaaactgatgcctatgttgtaaagtgtgatacatggatgtgtaccaatttggctactaagattgtgatgacttgggggaacggacaatgtagacctgttcctaagctaaacaacattgctcgcttgcctatgactgttattgtgaagccttgttacctttttggtattgctaaaccaatcttgaactatattaaaatggctatacagcaatctaccggtgtttctcttgactgggaacaaccgatgttttacaaatgtactgaaatttaccctgtaccaaacggtggtgtgaagtggattaaaatttaataaactgagttgatactggaactgtgtggcatcttttggttaggatggatattaaactttcaaataagagtccttatattaca

SEQ ID NO: 326 - DNA, 1800 bp, Feline panleukopenia virus FPV/INDIA/MZ26
  source 1..1800: mol_type = genomic DNA; note = Feline panleukopenia virus FPV/INDIA/MZ26 / Protoparvovirus carnivoran 1 - PP035815
ccaatgagtgatggagcagttcaaccagacggtggtcaacctgctgtcagaaatgaaagagctacaggatctgggaacgggtctggaggcgggggtggtggtggttctgggggtgtggggatttctacgggtactttcaataatcagacggaatttaaatttttggaaaacggatgggtggaaatcacagcaaactcaagcagacttgtacatttaaatatgccagaaagtgaaaattataaaagagtagttgtaaataatatggataaaactgcagttaaaggaaacatggctttagatgatactcatgtacaaattgtaacaccttggtcattggttgatgcaaatgcttggggagtttggtttagtccaggagattggcaactaattgttaatactatgagtgagttgcatttagttagttttgaacaagaaatttttaatgttgttttaaagactgtttcagaatctgctactcagccaccaactaaagtttataataatgatttaactgcatcattgatggttgcattagatactaataatactatgccatttactccagcagctatgagatctgagacattgggtttttatccatggaaaccaaccataccaactccatggagatattattttcaatgggatagaacattaataccatctcatactggaactagtggcacaccaacaaatgtatatcatggtacagatccagatgatgttcaattttatactattgaaaattctgtgccagtacacttactaagaacaggtgatgaatttgctacaggaacatttttttttgattgtaaaccatgtagactaacacatacatggcaaacaaatagagcattgggcttaccaccatttttaaattctttgcctcaatctgaaggagctactaactttggtgatataggagttcaacaagataaaagacgcggtgtaactcaaatgggaaatacagactatattactgaagctactattatgagaccagctgaggttggttatagtgcaccatattattcttttgaagcatctacacaagggccatttaaaacacctattgcagcaggacgggggggagcacaaacagatgaaaatcaagcagcagatggtgatccaagatatgcatttggtagacaacatggtcaaaaaactactacaacaggagagacacctgagagatttacatatgtagcacatcaagatacaggaagatatccagaaggagattggattcaaaatattaactttaaccttcctgtaacaaatgataatgtattgctaccaacagatccaattggaggtaaaacaggaattaactatactaatatatttaatacttatggtcctttaactgcattaaataatgtaccaccagtttatccaaatggtcaaatttgggataaagaatttgatactgacttaaaaccaagacttcatgtaaatgcaccatttgtttgtcaaaataattgtcctggtcaattatttgtaaaagttgcgcctaatttaacaaatgaatatgatcctgatgcatctgctaatatgtcaagaattgtaacttactcagatttttggtggaaaggtaaattagtatttaaagctaaactaagagcatctcatacttggaatccaattcaacaaatgagtattaatgtagataaccaatttaactatgtaccaaataatattggagctatgaaaattgtatatgaaaaatctcaactagcacctagaaaattatattaatatactgactatgtttttatgtttattacactagcacctagc

SEQ ID NO: 327 - DNA, 1805 bp, Feline panleukopenia virus FPV/INDIA/MZ33
  source 1..1805: mol_type = genomic DNA; note = Feline panleukopenia virus FPV/INDIA/MZ33 / Protoparvovirus carnivoran 1 - PP035816
ccaatgagtgatggagcagttcaaccagacggtggtcaacctgctgtcagaaatgaaagagctacaggatctgggaacgggtctggaggcgggggtggtggtggttctgggggtgtggggatttctacgggtactttcaataatcagacggaatttaaatttttggaaaacggatgggtggaaatcacagcaaactcaagcagacttgtacatttaaatatgccagaaagtgaaaattataaaagagtagttgtaaataatatggataaaactgcagttaaaggaaacatggctttagatgacactcatgtacaaattgtaacaccttggtcattggttgatgcaaatgcttggggagtttggtttaatccaggagattggcaactaattgttaatactatgagtgagttgcatttagttagttttgaacaagaaatttttaatgttgttttaaagactgtttcagaatctgctactcagccaccaactaaagtttataataatgatttaactgcatcattgatggttgcattagatactaataatactatgccatttactccagcagctatgagatctgagacattgggtttttatccatggaaaccaaccataccaactccatggagatattattttcaatgggatagaacattaataccatctcatactggaactagtggcacaccaacaaatgtatatcatggtacagatccagatgatgttcaattttatactattgaaaattctgtgccagtacacttactaagaacaggtgatgaatttgctacaggaacatttttttttgattgtaaaccatgtagactaacacatacatggcaaacaaatagagcattgggcttaccaccatttttaaattctttgcctcaatccgaaggagctcctaactttggtgatataggagttcaacaagataaaagacgcggtgtaactcaaatgggaaatacagactatattactgaagctactattatgagaccagctgaggttggttatagtgcaccatattattcttttgaagcatctacacaagggccatttaaaacacctattgcagcaggacgggggggagcacaaacagatgaaaatcaagcagcagatggtgatccaagatatgcatttggtagacaacatggtcaaaaaactactacaacaggagaaacacctgagagatttacatatgtagcacatcaagatacaggaagatatccagaaggagattggattcaaaatattaactttaaccttcctgtaacaaatgataatgtattgctaccaacagatccaattggaggtaaaacaggaattaactatactaatatatttaatacttatggtcctttaactgcattaaataatgtaccaccagtttatccaaatggtcaaatttgggataaagaatttgatactgacttaaaaccaagacttcatgtaaatgcaccatttgtttgtcaaaataattgtcctggtcaattatttgtaaaagttgcgcctaatttaacaaatgaatatgatcctgatgcatctgctaatatgtcaagaattgtaacttactcagatttttggtggaaaggtaaattagtatttaaagctaaactaagagcatctcatacttggaatccaattcaacaaatgagtattaatgtagataaccaatttaactatgtaccaaataatattggagctatgaaaattgtatatgaaaaatctcaactagcacctagaaaattatattaatatactgactatgtttttatgtttattacatatcaactagcacctag

SEQ ID NO: 328 - DNA, 1805 bp, Feline panleukopenia virus FPV/INDIA/MZ35
  source 1..1805: mol_type = genomic DNA; note = Feline panleukopenia virus FPV/INDIA/MZ35 / Protoparvovirus carnivoran 1 - PP035817
ccaatgagtgatggagcagttcaaccagacggtggtcaacctgctgtcagaaatgaaagagctacaggatctgggaacgggtctggaggcgggggtggtggtggttctgggggtgtggggatttctacgggtactttcaataatcagacggaatttaaatttttggaaaacggatgggtggaaatcacagcaaactcaagcagacttgtacatttaaatatgccagaaagtgaaaattataaaagagtagttgtaaataatatggataaaactgcagttaaaggaaacatggctttagatgatactcatgtacaaattgtaacaccttggtcattggttgatgcaaatgcttggggagtttggtttaatccaggagattggcaactaattgttaatactatgagtgagttgcatttagttagttttgaacaagaaatttttaatgttgttttaaagactgtttcagaatctgctactcagccaccaactaaagtttataataatgatttaactgcatcattgatggttgcattagatactaataatactatgccatttactccagcagctatgagatctgagacattgggtttttatccgtggaaaccaaccataccgactccatggagatattattttcaatgggatagaacattaataccatctcatactggaactagtggcacaccaacaaatgtatatcatggtacagatccagatgatgttcaattttatactattgaaaattctgtgccagtacacttactaagaacaggtgatgaatttgctacaggaacatttttttttgattgtaaaccatgtagactaacacatacatggcaaacaaatagagcattgggcttaccaccatttttaaattctttgcctcaatctgaaggagctactaactttggtgatataggagttcaacaagataaaagacgcggtgtaactcaaatgggaaatacagactatattactgaagctactattatgagaccagctgaggttggttatagtgcaccatattattcttttgaagcatctacacaagggccatttaaaacacctattgcagcaggacgggggggggcacaaacagatgaaaatcaagcagcagatggtgatccaagatatgcatttggtagacaacatggtcaaaaaactactacaacaggagaaacacctgagagatttacatatgtagcacatcaagatacaggaagatatccagaaggagattggattcaaaatattaactttaaccttcctgtaacaaatgataatgtattgctaccaacagatccaattggaggtaaaacaggaattaactatactaatatatttaatacttatggtcctttaactgcattaaataatgtaccaccagtttatccaaatggtcaaatttgggataaagaatttgatactgacttaaaaccaagacttcatgtaaatgcaccatttgtttgtcaaaataattgtcctggtcaattatttgtaaaagttgcgcctaatttaacaaatgaatatgatcctgatgcatctgctaatatgtcaagaattgtaacttactcagatttttggtggaaaggtaaattagtatttaaagctaaactaagagcatctcatacttggaatccaattcaacaaatgagtattaatgtagataaccaatttaactatgtaccaaataatattggagctatgaaaattgtatatgaaaaatctcaactagcacctagaaaattatattaatatactgactatgtttttatgtttattacatatcaactagcacctag

SEQ ID NO: 329 - DNA, 1755 bp, Protoparvovirus carnivoran1
  source 1..1755: mol_type = genomic DNA; note = Protoparvovirus carnivoran1 / Protoparvovirus carnivoran 1 - PP049248
atgagtgatggaggagttcaaccagacggtggtcaacctgctgtcagaaatgaaagagctacaggatctgggaacgggtctggaggcgggggtggtggtggttctgggggtgtggggatttctacgggtacttttaataatcagacggaatttaaatttttggaaaacggatgggtggaaatcacagcaaactcaagcagacttgtgcatttaaatatgccagaaagtgaaaattatagaagagtggttgtaaataatttggataaaactgcagttaacggaaacatggctttagatgatactcatgcacaaattgtaacaccttggtcattggttgatgcaaatgcttggggagtttggtttaatccaggagattggcaactaattgttaatactatgagtgagttgcatttagttagttttgaacaagaaatttttaatgttgttttaaagactgtttcagaatctgctactcagccaccaactaaagtttataataatgatttaactgcatcattgatggttgcattagatagtaataatactatgccatttactccagcagctatgagatctgagacattgggtttttatccatggaaaccaaccataccaactccatggagatattattttcaatgggatagaacattaataccatctcatactggaactagtggcacaccaacaaatatataccatggtacagatccagatgatgttcaattttacactattgaaaattctgtgccagtacacttactaagaacaggtgatgaatttgctacaggaacattttattttgattgtaaaccatgtagactaacacatacatggcaaacaaatagagcattgggcttaccaccatttctaaattctttgcctcaagctgaaggaggtactaactttggttatataggagttcaacaagataaaagacgtggtgtaactcaaatgggaaacacaaacattattactgaagctactattatgagaccagctgaggttggttatagtgcaccatattattcttttgaggcgtctacacaagggccatttaaaacacctattgcagcaggacgggggggagcgcaaacagatgaaaatcgagcagcagatggtgatccaagatatgcatttggtagacaacatggtcaaaaaactaccacaacaggagaaacacctgagagatttacatatatagcacatcaagatacaggaagatatccagaaggagattggattcaaaatattaactttaaccttcctgtaacagaagataatgtattgctaccaacagatccaattggaggtaaaacaggaattaactatactaatatatttaatacttatggtcctttaactgcattaaataatgtaccaccagtttatccaaatggtcaaatttgggataaagaatttgatactgacttaaaaccaagacttcatgtaaatgcaccatttgtttgtcaaaataattgtcctggtcaattatttgtaaaagttgcacctaatttaacaaatgaatatgatcctgatgcatctgctaatatgtcaagaattgtaacttactcagatttttggtggaaaggtaaattagtatttaaagctaaactaagagcctctcatacttggaatccaattcaacaaatgagtatcaatgtagataaccaatttaactatgtaccaagtaatattggaggtatgaaaattgtatatgaaaaatctcaactagcacctagaaaaatatattaa

SEQ ID NO: 330 - DNA, 855 bp, Goose parvovirus
  source 1..855: mol_type = genomic DNA; note = Goose parvovirus / Dependoparvovirus anseriform 1 - PP058119
acagtcatcacaaagaccaccagaacctgggtcctgccaagctacaacaatcacatctacaaagcaattaccagtggaacctctcaagatgcaaatgtccagtatgctggatacagtaccccctgggggtactttgatttcaatcgattccactgccacttctcccctagagactggcagagacttatcaacaaccactggggaatcaggcccaaatctcttaaattcaaaatcttcaatgttcaagtcaaggaagtcacaacgcaggatcagacaaagaccattgcaaacaatctcacctcaacaattcaagtttttacggatgatgagcatcaactcccgtatgtcctcggctcggctacggaagggaccatgccgccgttcccgtcggatgtctatgccctgccgcagtacgggtactgcacaatgcacaccaaccagaatggagcacggttcaatgaccgtagtgcattctactgcttagagtacttccctagtcagatgctgagaacaggtaacaactttgagttcacatttgactttgaagaagttcctttccacagcatgttcgctcattcacaggacttagacaggcttatgaaccccctagtagatcaatacctgtggaatttcaatgaggtagacagcagcagaaatgctcaatttaaaaaagctgtgaaaggggcttatggcaccatgagccgcaattggctgccaggacctaaattcctggatcagagagtgagggcctacacaggaggaacagacaattatgcaaactggaacatctggaataatgggaacaaggtgaatttaaaggacaggcagtatctcctacaacccggacctgtgtca

SEQ ID NO: 331 - DNA, 4269 bp, Canine parvovirus 2b Arg22
  source 1..4269: mol_type = genomic DNA; note = Canine parvovirus 2b Arg22 / Protoparvovirus carnivoran 1 - OK888554
atgtctggcaaccagtatactgaggaagttatggagggagtaaattggttaaagaaacatgcagaaaatgaagcattttcgtttgtttttaaatgtgacaacgtccaactaaatggaaaggatgttcgctggaacaactacaccaaaccaattcaaaatgaagagctaacatctttaattagaggagcacaaacagcaatggatcaaaccgaagaagaagaaatggactgggaatcggaagttgatagtctcgccaaaaagcaagtacaaacttttgatgcattaattaaaaaatgtctttttgaagtctttgtttctaaaaatatagaaccaaatgaatgtgtttggtttattcaacatgaatggggaaaagatcaaggctggcattgtcatgttttacttcatagtaagaacttacaacaagcaactggtaaatggctacgcagacaaatgaatatgtattggagtagatggttggtgactctttgttcggtaaacttaacaccaactgaaaagattaagctcagagaaattgcagaagatagtgaatgggtgactatattaacatacagacataagcaaacaaaaaaagactatgttaaaatggttcattttggaaatatgatagcatattactttctaacaaagaaaaaaattgtccacatgacaaaagaaagtggctattttttaagtactgattctggttggaaatttaactttatgaagtatcaagacagacaaattgtcagcacactttacactgaacaaatgaaaccagaaaccgttgaaaccacagtgacgacagcacaggaaacaaagcgcgggagaattcaaactaaaaaggaagtgtcaatcaaatgtactttgcgggacttggttagtaaaagagtaacatcacctgaagactggatgatgttacaaccagatagttatattgaaatgatggcacaaccaggaggtgaaaatcttttaaaaaatacacttgaaatttgtactttgactttagcaagaacaaaaacagcatttgaattaatacttgaaaaagcagataatactaaactaactaactttgatcttgcaaattctagaacatgtcaaatttttagaatgcacggatggaattggattaaagtttgtcacgctatagcatgtgttttaaatagacaaggtggtaaaagaaatacagttctttttcatggaccagcaagcacaggaaaatctatcattgctcaagccatagcacaagctgtgggtaatgttggttgttataatgcagcaaatgtaaatttcccatttaatgactgtaccaataaaaatttaatttggattgaagaagctggtaactttggtcaacaagttaatcaatttaaagcaatttgttctggacaaacaattagaattgatcaaaaaggtaaaggaagtaagcaaattgaaccaactccagtaattatgacaactaatgaaaatataacaattgtgagaattggatgtgaagaaagacctgaacatacacaaccaataagagacagaatgttgaacattaagttagtatgtaagcttccaggagactttggtttggttgataaagaagaatggcctttaatatgtgcatggttagttaaacatggttatgaatcaaccatggctaactatacacatcattggggaaaagtaccagaatgggatgaaaactgggcggagcctaaaatacaagaaggtataaattcaccaggttgcaaagacttagagacgcaagcggcaagcaatcctcagagtcaagaccaagttctaactcctctgactccggacgtagtggaccttgcactggaaccgtggagtactccagatacgcctattgcagaaactgcaaatcaacaatcaaaccaacttggcgttactcacaaagacgtgcaagcgagtccaacgtggtccgaaatagaggcagacctgagagccatctttacttctgaacaactggaagaagattttcgagacgacttggattaaggtacgatggcacctccggcaaagagagccaggagaggtaagggtgtgttagtaaagtggggggaggggaaagatttagtaacttaactaagtatgtgtttttttataggacttgtgcctccaggttataaatatcttgggcctgggaacagtcttgaccaaggagaaccaactaacccttctgacgccgctgcaaaagaacacgacgaagcttacgctgcttatcttcgctctggtaaaaacccatacttatatttctcgccagcagatcaacgctttatagatcaaactaaggacgctaaagattggggggggaaaataggacattatttttttagagctaaaaaggcaattgctccagtattaactgatacaccagatcatccatcagcatcaagaccaacaaaaccaactaaaagaagtaaaccaccacctcatattttcatcaatcttgcaaaaaaaaaaaaagccggtgcaggacaagtaaaaagagacaatcttgcaccaatgagtgatggagcaattcaaccagacggtggtcaacctgctgtcagaaatgaaagagcaacaggatctgggaacgggtctggaggcgggggtggtggtggttctgggggtgtggggatttctacgggtactttcaataatcagacggaatttaaatttttggaaaacggatgggtggaaatcacagcaaactcaagcagacttgtacatttaaatatgccagaaagtgaaaattatagaagagtggtcgtaaataatttggataaaactgcagttaacggaaacatggctttagatgatactcatgcacaaattgtaacaccttggtcattggttgatgcaaatgcttggggagtttggtttaatccaggagattggcaactaattgttaatactatgagtgagttgcatttagttagttttgaacaagaaatttttaatgttgttttaaagactgtttcagaatctgctactcagccaccaactaaagtttataataatgatttaactgcatcattgatggttgcattagatagcaataatactatgccatttactccagcagctatgagatctgagacattgggtttttatccatggaaaccaaccataccaactccatggagatattattttcaatgggatagaacattaataccatctcatactggaactagtggcacaccaacaaatatataccatggtacagatccagatgatgttcaattttatactattgaaaattctgtgccagtacacttactaagaacaggtgatgaatttgctacaggaacatttttttttgattgtaaaccatgtagactaacacatacatggcaaacaaatagagcattgggcttaccaccatttctaaattctttgcctcaagctgaaggaggtactaactttggttatataggagttcaacaagataaaagacgtggtgtaactcaaatgggaaatacaaactatattactgaagctactattatgagaccagctgaggttggttatagtgcaccatattattcttttgaggcgtctacacaagggccatttaaaacacctattgcagcaggacgggggggagcgcaaacagatgaaaatcaagcagcagatggtgatccaagatatgcatttggtagacaacatggtcaaaagactaccacaacaggagaaacacctgagagatttacatatatagcacatcaagatacaggaagatatccagaaggagattggattcaaaatattaactttaaccttcctgtaacagatgataatgtattgctaccaacagatccaattggaggtaaaacaggaattaactatactaatatatttaatacttatggtcctttaactgcattaaataatgtaccaccagtttatccaaatggtcaaatttgggataaagaatttgatactgacttaaaaccaagacttcatgtaaatgcaccatttgtttgtcaaaataattgtcctggtcaattatttgtaaaagttgcgcctaatttaacaaatgaatatgatcctgatgcatctgctaatatgtcaagaattgtaacttactcagatttttggtggaaaggtaaattagtatttaaagctaaactaagagcctctcatacttggaatccaattcaacaaatgagtattaatgtagataaccaatttaactatgtaccaagtaatattggaggtatgaaaattgtatatgaaaaatctcaactagcaccaagaaaattatattaa

SEQ ID NO: 332 - DNA, 4269 bp, Canine parvovirus 2c Arg35
  source 1..4269: mol_type = genomic DNA; note = Canine parvovirus 2c Arg35 / Protoparvovirus carnivoran 1 - OK888555
atgtctggcaaccagtatactgaggaagttatggagggagtaaattggttaaagaaacatgcagaaaatgaagcattttcgtttgtttttaaatgtgacaacgtccaactaaatggaaaggatgttcgctggaacaactataccaaaccaattcaaaatgaagagctaacatctttgattagaggagcacaaacagcaatggatcaaaccgaagaagaagaaatggactgggaatcggaagttgatagtctcgccaaaaagcaagtacaaacttttgatgcattaattaaaaaatgtctttttgaagtctttgtttctaaaaatatagaaccaaatgaatgtgtttggtttattcaacatgaatggggaaaagatcaaggctggcattgtcatgttttacttcatagtaagaacttacaacaagcaactggtaaatggctacgcagacaaatgaatatgtattggagtagatggttggtgactctttgttcggtaaacttaacaccaactgaaaagattaagctcagagaaattgcagaagatagtgaatgggtgactatattaacatacagacataagcaaacaaaaaaagactatgttaaaatggttcattttggaaatatgatagcatattactttttaacaaagaaaaaaattgtccacatgacaaaagaaagtggctattttttaagtactgattctggttggaaatttaactttatgaagtatcaagacagacaaattgtcagcacactttacactgaacaaatgaaaccagaaaccgttgaaaccacagtgacgacagcacaggaaacaaagcgcgggagaattcaaactaaaaaggaagtgtcaatcaaatgtactttgcgggacttggttagtaaaagagtaacatcacctgaagactggatgatgttacaaccagatagttatattgaaatgatggcacaaccaggaggtgaaaatcttttaaaaaatacacttgaaatttgtactttgactttagcaagaacaaaaacagcatttgaattaatacttgaaaaagcagataaaactaaactaactaactttgatcttgcaaattctagaacatgtcaaatttttagaatgcacggatggaattggattaaagtttgtcacgctatagcatgtgttttaaatagacaaggtggtaaaagaaatacagttctttttcatggaccagcaagtacaggaaaatctatcattgctcaagccatagcacaagctgtgggtaatgttggttgttataatgcagcaaatgtaaattttccatttaatgactgtaccaataaaaatttaatttggattgaagaagctggtaactttggtcagcaagttaatcaatttaaagcaatctgttctggacaaacaatcagaattgatcaaaaaggtaaaggaagtaagcaaattgaaccaactccagtaattatgacaactaatgaaaatataacaattgtgagaattggatgtgaagaaagacctgaacatacacaaccaataagagacagaatgttgaacattaagttagtatgtaagcttccaggagactttggtttggttgataaagaagaatggcctttaatatgtgcatggttagttaaacatggttatgtatcaaccatggctaactatacacatcattggggaaaagtaccagaatgggatgaaaactgggcggagcctaaaatacaagaaggtataaattcaccaggttgcaaagacttagagacgcaagcggcaagcaatcctcagagtcaagaccaagctctaactcctctgactccggacgtagtggaccttgcactggaaccgtggagtactccagatacgcctattgcagaaactgcaaatcagcaatcaaaccaacttggcgttactcacaaagacgtgcaagcgagtccaacgtggtccgaaatagaggcagacctgagagccatctttacttctgaacaactggaagaagattttcgagacgacttggattaaggtacgatggcacctccggcaaagagagccaggagaggtaagggtgtgttagtaaagtggggggaggggaaagatttagtaacttaactaagtatgtgtttttttataggacttgtgcctccaggttataaatatcttgggcctgggaacagtcttgaccaaggagaaccaactaacccttctgacgccgctgcaaaagaacacgacgaagcttacgctgcttatcttcgctctggtaaaaacccatacttatatttctcgccagcagatcaacgctttatagatcaaactaaggacgctaaagattggggggggaaaataggacattatttttttagagctaaaaaggcaattgctccagtattaactgatacaccagatcatccatcaacatcaagaccaacaaaaccaactaaaagaagtaaaccaccacctcatattttcatcaatcttgcaaaaaaaaaaaaagccggtgcaggacaagtaaaaagagacaatcttgcaccaatgagtgatggagcagttcaaccagacggtggtcaacctgctgtcagaaatgaaagagcaacaggatctgggaacgggtctggaggcgggggtggtggtggttctgggggtgtggggatttctacgggtactttcaataatcagacggaatttaaatttttggaaaacggatgggtggaaatcacagcaaactcaagcagacttgtacatttaaatatgccagaaagtgaaaattatagaagagtggttgtaaataatttggataaaactgcagttaacggaaacatggctttagatgatactcatgcacaaattgtaacaccttggtcattggttgatgcaaatgcttggggagtttggtttaatccaggagattggcaactaattgttaatactatgagtgagttgcatttagttagttttgaacaagaaatttttaatgttgttttaaagactgtttcagaatctgctactcagccaccaactaaagtttataataatgatttaactgcatcattgatggttgcattagatagtaataatactatgccatttactccagcagctatgagatctgagacattgggtttttatccatggaaaccaaccataccaactccatggagatattattttcaatgggatagaacattaataccatctcatactggaactagtggcacaccaacaaatatataccatggtacagatccagatgatgttcaattttatactattgaaaattctgtgccagtacacttactaagaacaggtgatgaatttgctacaggaacatttttttttgattgtaaaccatgtagactaacacatacatggcaaacaaatagagcattgggcttaccaccatttctaaattctttgcctcaagctgaaggaggtactaactttggttatataggagttcaacaagataaaagacgtggtgtaactcaaatgggaaatacaaactatattactgaagctactattatgagaccagctgaggttggttatagtgcaccatattattcttttgaggcgtctacacaagggccatttaaaacacctattgcagcaggacgggggggagcacaaacagatgaaaatcaagcagcagatggtgatccaagatatgcatttggtagacaacatggtcaaaaaactaccacaacaggagaaacacctgagagatttacatatatagcacatcaagatacaggaagatatccagaaggagattggattcaaaatattaactttaaccttcctgtaacagaagataatgtattgctaccaacagatccaattggaggtaaaacaggaattaactatactaatatatttaatacttatggtcctttaactgcattaaataatgtaccaccagtttatccaaatggtcaaatttgggataaagaatttgatactgacttaaaaccaagacttcatgtaaatgcaccatttgtttgtcaaaataattgtcctggtcaattatttgtgaaagttgcgcctaatttaacaaatgaatatgatcctgatgcatctgctaatatgtcaagaattgtaacttactcagatttttggtggaaaggtaaattagtatttaaagctaaactaagagcctctcatacttggaatccaattcaacaaatgagtattaatgtagataaccaatttaactatgtaccaagtaatattggaggtatgaaaattgtatatgaaaaatctcaactagcacctagaaaattatattaa

SEQ ID NO: 333 - DNA, 4269 bp, Canine parvovirus 2a Arg41
  source 1..4269: mol_type = genomic DNA; note = Canine parvovirus 2a Arg41 / Protoparvovirus carnivoran 1 - OK888556
atgtctggcaaccagtatactgaggaagttatggagggagtaaattggttaaagaaacatgcagaaaatgaagcattttcgtttgtttttaaatgtgacaacgtccaactaaatggaaaggatgttcgctggaacaactataccaaaccaattcaaaatgaagagctaacatctttgattagaggagcacaaacagcaatggatcaaaccgaagaagaagaaatggactgggaatcggaagttgatagtctcgccaaaaagcaagtacaaacttttgatgcattaattaaaaaatgtctttttgaagtctttgtttctaaaaatatagaaccaaatgaatgtgtttggtttattcaacatgaatggggaaaagatcaaggctggcattgtcatgttttacttcatagtaagaacttacaacaagcaactggtaaatggctacgcagacaaatgaatatgtattggagtagatggttggtgactctttgttcggtaaacttaacaccaactgaaaagattaagctcagagaaattgcagaagatagtgaatgggtgactatattaacatacagacataagcaaacaaaaaaagactatgttaaaatggttcattttggaaatatgatagcatattactttttaacaaagaaaaaaattgtccacatgacaaaagaaagtggctattttttaagtactgattctggttggaaatttaactttatgaagtatcaagacagacaaattgtcagcacactttacactgaacaaatgaaaccagaaaccgttgaaaccacagtgacgacagcacaggaaacaaagcgcgggagaattcaaactaaaaaggaagtgtcaatcaaatgtactttgcgggacttggttagtaaaagagtaacatcacctgaagactggatgatgttacaaccagatagttatattgaaatgatggcacaaccaggaggtgaaaatcttttaaaaaatacacttgaaatttgtactttgactttagcaagaacaaaaacagcatttgaattaatacttgaaaaagcagataaaactaaactaactaactttgatcttgcaaattctagaacatgtcaaatttttagaatgcacggatggaattggattaaagtttgtcacgctatagcatgtgttttaaatagacaaggtggtaaaagaaatacagttctttttcatggaccagcaagtacaggaaaatctatcattgctcaagccatagcacaagctgtgggtaatgttggttgttataatgcagcaaatgtaaattttccatttaatgactgtaccaataaaaatttaatttggattgaagaagctggtaactttggtcagcaagttaatcaatttaaagcaatctgttctggacaaacaatcagaattgatcaaaaaggtaaaggaagtaagcaaattgaaccaactccagtaattatgacaactaatgaaaatataacaattgtgagaattggatgtgaagaaagacctgaacatacacaaccaataagagacagaatgttgaacattaagttagtatgtaagcttccaggagactttggtttggttgataaagaagaatggcctttaatatgtgcatggttagttaaacatggttatgaatcaaccatggctaactatacacatcattggggaaaagtaccagaatgggatgaaaactgggcggagcctaaaatacaagaaggtataaattcaccaggttgcaaagacttagagacgcaagcggcaagcaatcctcagagtcaagaccaagctataactcctctgactccggacgtagtggaccttgcactggaaccgtggagtactccagatacgcctattgcagaaactgcaaatcagcaatcaaaccaatttggcgttactcacaaagacgtgcaagcgagtccaacgtggtccgaaatagaggcagacctgagagccatctctacttctgaacaactggaagaagattttcgagacgacttggattaaggtacgatggcacctccggcaaagagagccaggagaggtaagggtgtgttagtaaagtggggggaggggaaagatttagtaacttaactaagtatgtgtttttttataggacttgtgcctccaggttataaatatcttgggcctgggaacagtcttgaccaaggagaaccaactaacccttctgacgccgctgcaaaagaacacgacgaagcttacgctgcttatcttcgctctggtaaaaacccatacttatatttctcgccagcagatcaacgctttatagatcaaactaaggacgctaaagattggggggggaaaataggacattatttttttagagctaaaaaggcaattgctccagtattaactgatacaccagatcatccatcaacatcaagaccaacaaaaccaactaaaagaagtagaccaccacctcatattttcatcaatcttgcaaaaaaaaaaaaagccggtgcaggacaagtaaaaagagacaatcttgcaccaatgagtgatggagcagttcaaccagacggtggtcagcctgctgtcagaaatgaaagagctacaggatctgggaacgggtctggaggcgggggtggtggtggttctgggggtgtggggatttctacgggtactttcaataatcagacggaatttaaatttttggaaaacggatgggtggaaatcacagcaaactcaagcagacttgtacatttaaatatgccagaaagtgaaaattatagaagagtggttgtaaataatttggataaaactgcagttaacggaaacatggctttagatgatacccatgcacaaattgtaacaccttggtcattggttgatgcaaatgcttggggagtttggtttaatccaggagattggcaactaattgttaatactatgagtgagttgcatttagttagttttgaacaagaaatttttaatgttgttttaaagactgtttcagaatctgctactcagccaccaactaaagtttataataatgatttaactgcatcattgatggttgcattagatagtaataatactatgccatttactccagcagctatgagatctgagacattgggtttttatccatggaaaccaaccataccaactccatggagatattattttcaatgggatagaacattaataccatctcatactggaactagtggcacaccaacaaatatataccatggtacagatccagatgatgttcaattttacactattgaaaattctgtgccagtacacttactaagaacaggtgatgaatttgctacaggaacattttattttgattgtaaaccatgtagactaacacacacatggcaaacaaatagagcattgggcttaccaccatttctaaattctttgcctcaagctgaaggaggtactaactttggttatataggagttcaacaagataaaagacgtggtgtaactcaaatgggaaatacaaacattattactgaagctactattatgagaccagctgaggttggttatagtgcaccatattattcttttgaggcgtctacacaagggccatttaaaacacctattgcagcaggacgggggggagcgcaaacagatgaaaatcaagcagcagatggtgatccaagatatgcatttggtagacaacatggtcaaaaaactaccacaacaggagaaacacctgagagatttacatatatagcacatcaagatacaggaagatatccagaaggagattggattcaaaatattaactttaaccttcctgtaacaaatgataatgtattgctaccaacagatccaattggaggtaaagcaggaattaactatactaatatatttaatacttatggtcctttaactgcattaaataatgtaccaccagtttatccaaatggtcaaatttgggataaagaatttgatactgacttaaaaccaagacttcatgtaaatgcaccatttgtttgtcaaaataattgtcctggtcaattatttgtaaaagttgcgcctaatttaacaaatgaatatgatcctgatgcatctgctaatatgtcaagaattgtaacttactcagatttttggtggaaaggtaaattagtatttaaagctaaactaagagcctctcatacttggaatccaattcaacaaatgagtattaatgtagataaccaatttaactatgtaccaagtaatattggaggtatgaaaattgtatatgaaaaatctcaactagcacctagaaaattatactaa

SEQ ID NO: 334 - DNA, 4269 bp, Canine parvovirus 2c Arg 43
  source 1..4269: mol_type = genomic DNA; note = Canine parvovirus 2c Arg 43 / Protoparvovirus carnivoran 1 - OK888557
atgtctggcaaccagtatactgaggaagttatggagggagtaaattggttaaagaaacatgcagaaaatgaagcattttcgtttgtttttaaatgtgacaacgtccaactaaatggaaaggatgttcgctggaacaactataccaaaccaattcaaaatgaagagctaacatctttgattagaggagcacaaacagcaatggatcaaaccgaagaagaagaaatggactgggaatcggaagttgatagtctcgccaaaaagcaagtacaaacttttgatgcattaattaaaaaatgtctttttgaagtctttgtttctaaaaatatagaaccaaatgaatgtgtttggtttattcaacatgaatggggaaaagatcaaggctggcattgtcatgttttacttcatagtaagaacttacaacaagcaactggtaaatggctacgcagacaaatgaatatgtattggagtagatggttggtgactctttgttcggtaaacttaacaccaactgaaaagattaagctcagagaaattgcagaagatagtgaatgggtgactatattaacatacagacataagcaaacaaaaaaagactatgttaaaatggttcattttggaaatatgatagcatattactttttaacaaagaaaaaaattgtccacatgacaaaagaaagtggctattttttaagtactgattctggttggaaatttaactttatgaagtatcaagacagacaaattgtcagcacactttacactgaacaaatgaaaccagaaaccgttgaaaccacagtgacgacagcacaggaaacaaagcgcgggagaattcaaactaaaaaggaagtgtcaatcaaatgtactttgcgggacttggttagtaaaagagtaacatcacctgaagactggatgatgttacaaccagatagttatattgaaatgatggcacaaccaggaggtgaaaatcttttaaaaaatacacttgaaatttgtactttgactttagcaagaacaaaaacagcatttgaattaatacttgaaaaagcagacaaaactaaactaactaactttgatcttgcaaattctagaacatgtcaaatttttagaatgcacggatggaattggattaaagtttgtcacgctatagcatgtgttttaaatagacaaggtggtaaaagaaatacagttctttttcatggaccagcaagtacaggaaaatctatcattgctcaagccatagcacaagctgtgggtaatgttggttgttataatgcagcaaatgtaaattttccatttaatgactgtaccaataaaaatttaatttggattgaagaagctggtaactttggtcagcaagttaatcaatttaaagcaatctgttctggacaaacaatcagaattgatcaaaaaggtaaaggaagtaagcaaattgaaccaactccagtaattatgacaactaatgaaaatataacaattgtgagaattggatgtgaagaaagacctgaacatacacaaccaataagagacagaatgttgaacattaagttagtatgtaagcttccaggagactttggtttggttgataaagaagaatggcctttaatatgtgcatggttagttaaacatggttatgaatcaaccatggctaactatacacatcattggggaaaagtaccagaatgggatgaaaactgggcggagcctaaaatacaagaaggtataaattcaccaggttgcaaagacttagagacgcaagcggcaagcaatcctcagagtcaagaccaagctctaactcctctgactccggacgtagtggaccttgcactggaaccgtggagtactccagatacgcctattgcagaaactgcaaatcagcaatcaaaccaacttggcgttactcacaaagacgtgcaagcgagtccaacgtggtccgaaatagaggcagacctgagagccatctttacttctgaacaactggaagaagattttcgagacgacttggattaaggtacgatggcacctccggcaaagagagccaggagaggtaagggtgtgttagtaaagtggggggaggggaaagatttagtaacttaactaagtatgtgtttttttataggacttgtgcctccaggttataaatatcttgggcctgggaacagtcttgaccaaggagaaccaactaacccttctgacgccgctgcaaaagaacacgacgaagcttacgctgcttatcttcgctctggtaaaaacccatacttatatttctcgccagcagatcaacgctttatagatcaaactaaggacgctaaagattggggggggaaaataggacattatttttttagagctaaaaaggcaattgctccagtattaactgatacaccagatcatccatcaacatcaagaccaacaaaaccaactaaaagaagtaaaccaccacctcatattttcatcaatcttgcaaaaaaaaaaaaagccggtgcaggacaagtaaaaagagacaatcttgcaccaatgagtgatggagcagttcaaccagacggtggtcaacctgctgtcagaaatgaaagagcaacaggatctgggaacgggtctggaggcgggggtggtggtggttctgggggtgtggggatttctacgggtactttcaataatcagacggaatttaaatttttggaaaacggatgggtggaaatcacagcaaactcaagcagacttgtacatttaaatatgccagaaagtgaaaattatagaagagtggttgtaaataatttggataaaactgcagttaacggaaacatggctttagatgatactcatgcacaaattgtaacaccttggtcattggttgatgcaaatgcttggggagtttggtttaatccaggagattggcaactaattgttaatactatgagtgagttgcatttagttagttttgaacaagaaatttttaatgttgttttaaagactgtttcagaatctgctactcagccaccaactaaagtttataataatgatttaactgcatcattgatggttgcattagatagtaataatactatgccatttactccagcagctatgagatctgagacattgggtttttatccatggaaaccaaccataccaactccatggagatattattttcaatgggatagaacattaataccatctcatactggaactagtggcacaccaacaaatatataccatggtacagatccagatgatgttcaattttatactattgaaaattctgtgccagtacacttactaagaacaggtgatgaatttgctacaggaacatttttttttgattgtaaaccatgtagactaacacatacatggcaaacaaatagagcattgggcttaccaccatttctaaattctttgcctcaagctgaaggaggtactaactttggttatataggagttcaacaagataaaagacgtggtgtaactcaaatgggaaatacaaactatattactgaagctactattatgagaccagctgaggttggttatagtgcaccatattattcttttgaggcgtctacacaagggccatttaaaacacctattgcagcaggacgggggggagcacaaacagatgaaaatcaagcagcagatggtgatccaagatatgcatttggtagacaacatggtcaaaaaactaccacaacaggagaaacacctgagagatttacatatatagcacatcaagatacaggtagatatccagaaggagattggattcaaaatattaactttaaccttcctgtaacagaagataatgtattgctaccaacagatccaattggaggtaaaacaggaattaactatactaatatatttaatacttatggtcctttaactgcattaaataatgtaccaccagtttatccaaatggtcaaatttgggataaagaatttgatactgacttaaaaccaagacttcatgtaaatgcaccatttgtttgtcaaaataattgtcctggtcaattatttgtaaaagttgcgcctaatttaacaaatgaatatgatcctgatgcatctgctaatatgtcaagaattgtaacttactcagatttttggtggaaaggtaaattagtatttaaagctaaactaagagcctctcatacttggaatccaattcaacaaatgagtattaatgtagataaccaatttaactatgtaccaagtaatattggaggtatgaaaattgtctatgaaaaatctcaactagcacctagaaaattatattaa

SEQ ID NO: 335 - DNA, 4269 bp, Canine parvovirus 2c Arg45
  source 1..4269: mol_type = genomic DNA; note = Canine parvovirus 2c Arg45 / Protoparvovirus carnivoran 1 - OK888558
atgtctggcaaccagtatactgaggaagttatggagggagtaaattggttaaagaaacatgcagaaaatgaagcattttcgtttgtttttaagtgtgacaacgtccaactaaatggaaaggatgttcgctggaacaactataccaaaccaattcaaaatgaagagctaacatctttgattagaggagcacaaacagcaatggatcaaaccgaagaagaagaaatggactgggaatcggaagttgatagtctcgccaaaaagcaagtacaaacttttgatgcattaattaaaaaatgtctttttgaagtctttgtttctaaaaatatagaaccaaatgaatgtgtttggtttattcaacatgaatggggaaaagatcaaggctggcattgtcatgttttacttcatagtaagaacttacaacaagcaactggtaaatggctacgcagacaaatgaatatgtattggagtagatggttggtgactctttgttcggtaaacttaacaccaactgaaaagattaagctcagagaaattgcagaagatagtgaatgggtgactatattaacatacagacataagcaaacaaaaaaagactatgttaaaatggttcattttggaaatatgatagcatattactttttaacaaagaaaaaaattgtccacatgacaaaagaaagtggctattttttaagtactgattctggttggaaatttaactttatgaagtatcaagacagacaaattgtcagcacactttacactgaacaaatgaaaccagaaaccgttgaaaccacagtgacgacagcacaggaaacaaagcgcgggagaattcaaactaaaaaggaagtgtcaatcaaatgtactttgcgggacttggttagtaaaagagtaacatcacctgaagactggatgatgttacaaccagatagttatattgaaatgatggcacaaccaggaggtgaaaatcttttaaaaaatacacttgaaatttgtactttgactttagcaagaacaaaaacagcatttgaattaatacttgaaaaagcagataaaactaaactaactaactttgatcttgcaaattctagaacatgtcaaatttttagaatgcacggatggaattggattaaagtttgtcacgctatagcatgtgttttaaatagacaaggtggtaaaagaaatacagttctttttcatggaccagcaagtacaggaaaatctatcattgctcaagccatagcacaagctgtgggtaatgttggttgttataatgcagcaaatgtaaattttccatttaatgactgtaccaataaaaatttaatttggattgaagaagctggtaactttggtcagcaagttaatcaatttaaagcaatctgttctggacaaacaatcagaattgatcaaaaaggtaaaggaagtaagcaaattgaaccaactccagtaattatgacaactaatgaaaatataacaattgtgagaattggatgtgaagaaagacctgaacatacacaaccaataagagacagaatgttgaacattaagttagtatgtaagcttccaggagactttggtttggttgataaagaagaatggcctttaatatgtgcatggttagttaaacatggttatgaatcaaccatggctaactatacacatcattggggaaaagtaccagaatgggatgaaaactgggcggagcctaaaatacaagaaggtataaattcaccaggttgcaaagacttagagacgcaagcggcaagcaatcctcagagtcaagaccaagctctaactcctctgactccggacgtagtggaccttgcactggaaccgtggagtactccagatacgcctattgcagaaactgcaaatcagcaatcaaaccaacttggcgttactcacaaagacgtgcaagcgagtccaacgtggtccgaaatagaggcagacctgagagccatctttacttctgaacaactggaagaagattttcgagacgacttggattaaggtacgatggcacctccggcaaagagagccaggagaggtaagggtgtgttagtaaagtggagggaggggaaagatttagtaacttaactaagtatgtgtttttttataggacttgtgcctccaggttataaatatcttgggcctgggaacagtcttgaccaaggagaaccaactaacccttctgacgccgctgcaaaagaacacgacgaagcttacgctgcttatcttcgctctggtaaaaacccatacttatatttctcgccagcagatcaacgctttatagatcaaactaaggacgctaaagattggggggggaaaataggacattatttttttagagctaaaaaggcaattgctccagtattaactgatacaccagatcatccatcaacatcaagaccaacaaaaccaactaaaagaagtaaaccaccacctcatattttcatcaatcttgcaaaaaaaaaaaaagccggtgcaggacaagtaaaaagagacaatcttgcaccaatgagtgatggagcagttcaaccagacggtggtcaacctgctgtcagaaatgaaagagcaacaggatctgggaacgggtctggaggcgggggtggtggtggttctgggggtgtggggatttctacgggtactttcaataatcagacggaatttaaatttttggaaaacggatgggtggaaatcacagcaaactcaagtagacttgtacatttaaatatgccagaaagtgaaaattatagaagagtggttgtaaataatttggataaaactgcagttaacggaaacatggctttagatgatactcatgcacaaattgtaacaccttggtcattggttgatgcaaatgcttggggagtttggtttaatccaggagattggcaactaattgttaatactatgagtgagttgcatttagttagttttgaacaagaaatttttaatgttgttttaaagactgtttcagaatctgctactcagccaccaactaaagtttataataatgatttaactgcatcattgatggttgcattagatagtaataatactatgccatttactccagcagctatgagatctgagacattgggtttttatccatggaaaccaaccataccaactccatggagatattattttcaatgggatagaacattaataccatctcatactggaactagtggcacaccaacaaatatataccatggtacagatccagatgatgttcaattttatactattgaaaattctgtgccagtacacttactaagaacaggtgatgaatttgctacaggaacatttttttttgattgtaaaccatgtagactaacacatacatggcaaacaaatagagcattgggcttaccaccatttctaaattctttgcctcaagctgaaggaggtactaactttggttatataggagttcaacaagataaaagacgtggtgtaactcaaatgggaaatacaaactatattactgaagctactattatgagaccagctgaggttggttatagtgcaccatattattcttttgaggcgtctacacaagggccatttaaaacacctattgcagcaggacgggggggagcacaaacagatgaaaatcaagcagcagatggtgatccaagatatgcatttggtagacaacatggtcaaaaaactaccacaacaggagaaacacctgagagatttacatatatagcacatcaagatacaggaagatatccagaaggagattggattcaaaatattaactttaaccttcctgtaacagaggataatgtattgctaccaacagatccaattggaggtaaaacaggaattaactatactaatatatttaatacttatggtcctttaactgcattaaataatgtaccaccagtttatccaaatggtcaaatttgggataaagaatttgatactgacttaaaaccaagacttcatgtaaatgcaccatttgtttgtcaaaataattgtcctggtcaattatttgtaaaagttgcgcctaatctaacaaatgaatatgatcctgatgcatctgctaatatgtcaagaattgtaacttactcagatttttggtggaaaggtaaattagtatttaaagctaaactaagagcctctcatacttggaatccaattcaacaaatgagtattaatgtagataaccaatttaactatgtaccaagtaatattggaggtatgaaaattgtatatgaaaaatctcaactagcacctagaaaattatactaa

SEQ ID NO: 336 - DNA, 4269 bp, Canine parvovirus 2c UY382
  source 1..4269: mol_type = genomic DNA; note = Canine parvovirus 2c UY382 / Protoparvovirus carnivoran 1 - OK888559
atgtctggcaaccagtatactgaggaagttatggagggagtaaattggttaaagaaacatgcagaaaatgaagcattttcgtttgtttttaaatgtgacaacgtccaactaaatggaaaggatgttcgctggaacaactataccaaaccaattcaaaatgaagagctaacatctttgattagaggagcacaaacagcaatggatcaaaccgaagaagaagaaatggactgggaatcggaagttgatagtctcgccaaaaagcaagtacaaacttttgatgcattaattaaaaaatgtctttttgaagtctttgtttctaaaaatatagaaccaaatgaatgtgtttggtttattcaacatgaatggggaaaagatcaaggctggcattgtcatgttttacttcatagtaagaacttacaacaagcaactggtaaatggctacgcagacaaatgaatatgtattggagtagatggttggtgactctttgttcggtaaacttaacaccaactgaaaagattaagctcagagaaattgcagaagatagtgaatgggtgactatattaacatacagacataagcaaacaaaaaaagactatgttaaaatggttcattttggaaatatgatagcatattactttttaacaaagaaaaaaattgtccacatgacaaaagaaagtggctattttttaagtactgattctggttggaaatttaactttatgaagtatcaagacagacaaattgtcagcacactttacactgaacaaatgaaaccagaaaccgttgaaaccacagtgacgacagcacaggaaacaaagcgcgggagaattcaaactaaaaaggaagtgtcaatcaaatgtactttgcgagacttggttagtaaaagagtaacatcacctgaagactggatgatgttacaaccagatagttatattgaaatgatggcacaaccaggaggtgaaaatcttttaaaaaatacacttgaaatttgtactttgactttagcaagaacaaaaacagcatttgaattaatacttgaaaaagcagataaaactaaactaactaactttgatcttgcaagttctagaacatgtcaaatttttagaatgcacggatggaattggattaaagtttgtcacgctatagcatgtgttttaaatagacaaggtggtaaaagaaatacagttctttttcatggaccagcaagtacagggaaatctatcattgctcaagccatagcacaagctgtgggtaatgttggttgttataatgcagcaaatgtaaattttccatttaatgactgtaccaataaaaatttaatttggattgaagaagctggtaactttggtcagcaagttaatcaatttaaagcaatctgttctggacaaacaattagaatcgatcaaaaaggtaaaggaagtaagcaaattgaaccaactccagtaattatgacaactaatgaaaatataacaattgtgagaattggatgtgaagagagacctgaacatacacaaccaataagagacagaatgttgaacattaagttagtatgtaagcttccaggagactttggtttggttgataaagaagaatggcctttaatatgtgcatggttagttaaacatggttatgaatcaaccatggctaactatacacatcattggggaaaagtaccagaatgggatgaaaactgggcggagcctaaaatacaagaaggtataaattcaccaggttgcaaagacttagagacgcaagcggcaagcaatcctcagagtcaagaccaagttctaactcctctgactccggacgtagtggaccttgcactggaaccgtggagtactccagatacgcctattgcagaaactgcaaatcagcaatcaaaccaacttggcgttactcacaaagacgtgcaagcgagtccaacgtggtccgaaatagaggcagacctgagagccatctttacttctgaacaactggaagaagattttcgagacgacttggattaaggtacgatggcacctccggcaaagagagccaggagaggtaagggtgtgttagtaaagtggggggaggggaaagatttagtaacttaactaagtatgtgtttttttataggacttgtgcctccaggttataaatatcttgggcctgggaacagtcttgaccaaggagaaccaactaacccttctgacgccgctgcaaaagaacacgacgaagcttacgctgcttatcttcgctctggtaaaaacccatacttatatttctcgccagcagatcaacgctttatagatcaaactaaggacgctaaagattggggggggaaaataggacattatttttttagagctaaaaaggcaattgctccagtattaactgatacaccagatcatccatcaacatcaagaccaacaaaaccaactaaaagaagtaaaccaccacctcatattttcatcaatcttgcaaaaaaaaaaaaagccggtgcaggacaagtaaaaagagacaatcttgcaccaatgagtgatggagcagttcaaccagacggtggtcaacctgctgtcagaaatgaaagagcaacaggatctgggaacgggtctggaggcgggggtggtggtggttctgggggtgtggggatttctacgggtactttcaataatcagacggaatttaaatttttggaaaacggatgggtggaaatcacagcaaactcaagcagacttgtacatttaaatatgccagaaagtgaaaattatagaagagtggttgtaaataatttggataaaactgcagttaacggaaacatggctttagatgatactcatgcacaaattgtaacaccttggtcattggttgatgcaaatgcttggggagtttggtttaatccaggagattggcaactaattgttaatactatgagtgagttgcatttagttagttttgaacaagaaatttttaatgttgttttaaagactgtttcagaatctgctactcagccaccaactaaagtttataataatgatttaactgcatcattgatggttgcattagatagtaataatactatgccatttactccagcagctatgagatctgagacattgggtttttatccatggaaaccaaccataccaactccatggagatattattttcaatgggatagaacattaataccatctcatactggaactagtggcacaccaacaaatatataccatggtacagatccagatgatgttcaattttatactattgaaaattctgtgccagtacacttactaagaacaggtgatgaatttgctacaggaacatttttttttgattgtaaaccatgtagactaacacatacatggcaaacaaatagagcattgggcttaccaccatttctaaattctttgcctcaagctgaaggaggtactaactttggttatataggagttcaacaagataaaagacgtggtgtaactcaaatgggaaatacaaactatattactgaagctactattatgagaccagctgaggttggttatagtgcaccatattattcttttgaggcgtctacacaagggccatttaaaacacctattgcagcaggacgggggggagcgcaaacagatgaaaatcaagcagcagatggtgatccaagatatgcatttggtagacaacatggtcaaaaaactaccacaacaggagaaacacctgagagatttacatatatagcacatcaagatacaggaagatatccagaaggagattggattcaaaatattaactttaaccttcctgtaacagaagataatgtattgctaccaacagatccaattggaggtaaaacaggaattaactatactaatatatttaatacttatggtcctttaactgcattaaataatgtaccaccagtttatccaaatggtcaaatttgggataaagaatttgatactgacttaaaaccaagacttcatgtaaatgcaccatttgtttgtcaaaataattgtcctggtcaattatttgtaaaagttgcgcctaatttaacaaatgaatatgatcctgatgcatctgctaatatgtcaagaattgtaacttactcagatttttggtggaaaggtaaattagtatttaaagctaaactaagagcctctcatacttggaacccaattcaacaaatgagtattaatgtagataaccaatttaactatgtaccaagtaatattggaggtatgaaaattgtatatgaaaaatctcaactagcacctagaaaattatattaa

SEQ ID NO: 337 - DNA, 4269 bp, Canine parvovirus 2a UY386
  source 1..4269: mol_type = genomic DNA; note = Canine parvovirus 2a UY386 / Protoparvovirus carnivoran 1 - OK888560
atgtctggcaaccagtatactgaggaagttatggagggagtaaattggttaaagaaacatgcagaaaatgaagcattttcatttgtttttaaatgtgacaacgtccaactaaatggaaaggatgttcgctggaacaactataccaaaccaattcaaaatgaagagctaacatctttaattagaggagcacaaacagcaatggatcaaaccgaagaagaagaaatggactgggaatcggaagttgatagtctcgccaaaaagcaagtacaaacttttgatgcattaattaaaaaatgtctttttgaagtctttgtttctaaaaatatagaaccaaatgaatgcgtttggtttattcaacatgaatggggaaaagatcaaggctggcattgtcatgttttacttcatagtaagaacttacaacaagcaactggtaaatggctacgcagacaaatgaatatgtattggagtagatggttggtgactctttgttcggtaaacttaacaccaactgaaaaaattaagctcagagaaattgcagaagatagtgaatgggtgactatattaacatacagacataagcaaacaaaaaaagactatgttaaaatggttcattttggaaatatgatagcatattactttttaacaaagaaaaaaattgtccacatgacaaaagaaagtggctattttttaagtactgattctggttggaaatttaactttatgaagtatcaagacagacaaattgtcagcacactttacactgaacaaatgaaaccagaaaccgttgaaaccacagtgacgacagcacaggaaacaaagcgcgggagaattcaaactaaaaaggaagtgtcaatcaaatgtactttgcgggacttggttagtaaaagagtaacatcacctgaagactggatgatgttacaaccagatagttatattgaaatgatggcacaaccaggaggtgaaaatcttttaaaaaatacacttgaaatttgtactttgactttagcaagaacaaaaacagcatttgaattaatacttgaaaaagcagataatactaaactaactaactttgatcttgcaaattctagaacatgtcaaatttttagaatgcacggatggaattggattaaagtttgtcacgctatagcatgtgttttaaatagacaaggtggcaaaagaaatacagttctttttcatggaccagcaagtacaggaaaatctatcattgctcaagccatagcacaagctgtgggtaatgttggttgttataatgcagcaaatgtaaattttccatttaatgactgtaccaataaaaatttaatttggattgaagaagctggtaactttggtcaacaagttaatcaatttaaagcaatctgttctggacaaacaattagaattgatcaaaaaggtaaaggaagtaagcaaattgaaccaactccagtaattatgacaactaatgaaaatataacaattgtgagaattggatgtgaagaaagacctgaacatacacaaccaataagagacagaatgttgaacatcaagttagtatgtaagcttccaggagactttggtttggttgataaagaagaatggcctttaatatgtgcatggttagttaaacatggttatgaatcaaccatggctaactatacacatcattggggaaaagtaccagaatgggatgaaaactgggcggagcctaaaatacaaaaaggtataaattcaccaggttgcaaagacttagagacgcaagcggcaagcaatcctcagagtcaagaccaagttctaactcctctgactccggacgtagtggaccttgcactggaaccgtggagtactccagatacgcctattgcagaaactgcaaatcaacaatcaaaccaacttggcgttactcacaaagacgtgcaagcgagtccaacgtggtccgaaatagaggcagacctgagagccatctttacttctgaacaattggaagaagattttcgagacgacttggattaaggtacgatggcacctccggcaaagagagccaggagaggtaagggtgtgttaataaggtggggggaggggaaagatttgataacttaactaagtatgtgtttttttataggacttgtgcctccaggttataaatatcttgggcctgggaacagtcttgaccaaggagaaccaactaacccttctgacgccgctgcaaaagaacacgacgaagcttacgctgcttatcttcgctctggtaaaaacccatacttatatttctcgccagcagatcaacgctttatagatcaaactaaggacgctaaagattggggggggaaaataggacattatttttttagagctaaaaaggcaattgctccagtattaactgatacaccagatcatccatcaacatcaagaccaacaaaaccaactaaaagaagtagaccaccacctcatattttcatcaatcttgcaaaaaaaaaaaaagccggtgcaggacaagtaaaaagagacaatcttgcaccaatgagtgatggagcagttcaaccagacggtggtcagcctgctgtcagaaatgaaagagctacaggatctgggaacgggtctggaggcgggggtggtggtggttctgggggtgtggggatttctacgggtactttcaataatcagacggaatttaaatttttggaaaacggatgggtggaaatcacagcaaactcaagcagacttgtacatttaaatatgccagaaagtgaaaattatagaagagtggttgtaaataatttggataaaactgcagttaacggaaacatggctttagatgatacccatgcacaaattgtaacaccttggtcattggttgatgcaaatgcttggggagtttggtttaatccaggagattggcaactaattgttaatactatgagtgagttgcatttagttagttttgaacaagaaatttttaatgttgttttaaagactgtttcagaatctgctactcagccaccaactaaagtttataataatgatttaactgcatcattgatggttgcattagatagtaataatactatgccatttactccagcagctatgagatctgagacattgggtttttatccatggaaaccaaccataccaactccatggagatattattttcaatgggatagaacattaataccatctcatactggaactagtggcacaccaacaaatatataccatggtacagatccagatgatgttcaattttacactattgaaaattctgtgccagtacacttactaagaacaggtgatgaatttgctacaggaacattttattttgattgtaaaccatgtagactaacacacacatggcaaacaaatagagcattgggcttaccaccatttctaaattctttgcctcaagctgaaggaggtactaactttggttatataggagttcaacaagataaaagacgtggtgtaactcaaatgggaaatacaaacattattactgaagctactattatgagaccagctgaggttggttatagtgcaccatattattcttttgaggcgtctacacaagggccatttaaaacacctattgcagcaggacgggggggagcgcaaacagatgaaaatcaagcagcagatggtgatccaagatatgcatttggtagacaacatggtcaaaaaactaccacaacaggagaaacacctgagagatttacatatatagcacatcaagatacaggaagatatccagaaggagattggattcaaaatattaactttaaccttcctgtaacaaatgataatgtattgctaccaacagatccaattggaggtaaagcaggaattaactatactaatatatttaatacttatggtcctttaactgcattaaataatgtaccaccagtttatccaaatggtcaaatttgggataaagaatttgatactgacttaaaaccaagacttcatgtaaatgcaccatttgtttgtcaaaataattgtcctggtcaattatttgtaaaagttgcgcctaatttaacaaatgaatatgatcctgatgcatctgctaatatgtcaagaattgtaacttactcagatttttggtggaaaggtaaattagtatttaaagctaaactaagagcctctcatacttggaatccaattcaacaaatgagtattaatgtagataaccaatttaactatgtaccaagtaatattggaggtatgaaaattgtatatgaaaaatctcaactagcacctagaaaattatactaa

SEQ ID NO: 338 - DNA, 4269 bp, Canine parvovirus 2c UY391
  source 1..4269: mol_type = genomic DNA; note = Canine parvovirus 2c UY391 / Protoparvovirus carnivoran 1 - OK888561
atgtctggcaaccagtatactgaggaagttatggagggagtaaattggttaaagaaacatgcagaaaatgaagcattttcgtttgtttttaaatgtgacaacgtccaactaaatggaaaggatgttcgctggaacaactataccaaaccaattcaaaatgaagagctaacatctttaattagaggagcacaaacagcaatggatcaaaccgaagaagaagaaatggactgggaatcggaagttgatagtctcgccaaaaagcaagtacaaacttttgatgcattaattaaaaaatgtctttttgaagtctttgtttctaaaaatatagaaccaaatgaatgtgtttggtttattcaacatgaatggggaaaagatcaaggctggcattgtcatgttttacttcatagtaagaacttacaacaagcaactggtaaatggctacgcagacaaatgaatatgtattggagtagatggttggtgactctttgttcggtaaacttaacaccaactgaaaagattaagctcagagaaattgcagaagatagtgaatgggtgactatattaacatacagacataagcaaacaaaaaaagactatgttaaaatggttcattttggaaatatgatagcatattactttttaacaaagaaaaaaattgtccacatgacaaaagaaagtggctattttttaagtactgattctggttggaaatttaactttatgaagtatcaagacagacaaattgtcagcacactttacactgaacaaatgaaaccagaaaccgttgaaaccacagtgacgacagcacaggaaacaaagcgcgggagaattcaaactaaaaaggaagtgtcaatcaaatgtactttgcgggacttggttagtaaaagagtaacatcacctgaagactggatgatgttacaaccagatagttatattgaaatgatggcacaaccaggaggtgaaaatcttttaaaaaatacacttgaaatttgtactttgactttagcaagaacaaaaacagcatttgaattaatacttgaaaaagcagataatactaaactgactaactttgatcttgcaaattctagaacatgtcagatttttagaatgcacggatggaactggattaaagtttgtcacgctatagcatgtgttttaaatagacaaggtggtaaaagaaatacagttctttttcatggaccagcaagtacaggaaaatctatcattgctcaagccatagcacaagctgtgggtaatgttggttgttataatgcagcaaatgtaaattttccatttaatgactgtaccaataaaaatttaatttggattgaagaagctggtaactttggtcaacaagttaatcaatttaaagcaatttgttctggacaaacaattagaattgatcaaaaaggtaaaggaagtaagcaaattgaaccaactccagtaattatgacaactaatgaaaatataacaattgtgagaattggatgtgaagaaagacctgaacatacacaaccaataagagacagaatgttgaacattaagttagtatgtaaacttccaggagactttggtttggttgataaagaagaatggcctttaatatgtgcatggttagttaaacatggttatgaatcaaccatggctaactatacacatcattggggaaaagtaccagaatgggatgaaaactgggcggagcctaaaatacaagaaggtataaattcaccaggttgcaaagacttagagacgcaagcggcaagcaatcctcagagtcaagaccaagttttaactcctctgactccggacgtagtggaccttgcactggaaccgtggagtactccagatacgcctattgcagaaactgcaaatcagcaatcaaaccaacttggcgttactcacaaagacgtgcaagcgagtccaacgtggtccgaaatagaggcagacctgagagccatctttacttctgaacaactggaagaagattttcgagacgacttggattaaggtacgatggcacctccggcaaagagagcccggagaggtaagggtgtgttagtaaagtggggggaggggaaagatttagtaacttaactaagtatgtgtttttttataggacttgtgcctccaggttataaatatcttgggcctgggaacagtcttgaccaaggagaaccaactaacccttctgacgccgctgcaaaagaacacgacgaagcttacgctgcttatcttcgctctggtaaaaacccatacttatatttctcgccagcagatcaacgctttatagatcaaactaaggacgctaaagattggggggggaaaataggacattatttttttagagctaaaaaggcaattgctccagtattaactgatacaccagatcatccatcaacatcaagaccaacaaaaccaactaaaagaagtaaaccaccacctcatattttcatcaatcttgcaaaaaaaaaaaaagccggtgcaggacaagtaaaaagagacaatcttgcaccaatgagtgatggagcagttcaaccagacggtggtcaacctgctgtcagaaatgaaagagcaacaggatctgggaacgggtctggaggcgggggtggtggtggttctgggggtgtggggatttctacgggtactttcaataatcagacggaatttaaatttttggaaaacggatgggtggaaatcacagcaaactcaagcagacttgtacatttaaatatgccagaaagtgaaaattatagaagagtggttgtaaataatttggataaaactgcagttaacggaaacatggctttagatgatactcatgcacaaattgtaacaccttggtcattggttgatgcaaatgcttggggagtttggtttaatccaggagattggcaactaattgttaatactatgagtgagttgcatttaattagttttgaacaagaaatttttaatgttgttttaaagactgtttcagaatctgctactcagccaccaactaaagtttataataatgatttaactgcatcattgatggttgcattagatagtaataatactatgccatttactccagcagctatgagatctgagacattgggcttttatccatggaaaccaaccataccaactccatggagatattattttcaatgggatagaacattaataccatctcatactggaactagtggcacaccaacaaatatataccatggtacagatccagatgatgttcaattttatactattgaaaattctgtgccagtacacttactaagaacaggtgatgaatttgctacaggaacatttttttttgattgtaaaccatgtagactaacacatacatggcaaacaaatagagcattgggcttaccaccatttctaaattctttgcctcaagctgaaggaggtactaactttggttatataggagttcaacaagataaaagacgtggtgtaactcaaatgggaaatacaaactatattactgaagctactattatgagaccagctgaggttggttatagtgcaccatattattcttttgaggcgtctacacaagggccatttaaaacacctattgcagcaggacgggggggagcgcaaacagatgaaaatcaagcagcagatggtgatccaagatatgcatttggtagacaacatggtcaaaaaactaccacaacaggagaaacacctgagagatttacatatatagcacatcaagatacaggaagatatccagaaggagattggattcaaaatattaactttaaccttcctgtaacagaagataatgtattgctaccaacagatccaattggaggtaaaacaggaattaactatactaatatatttaatacttatggtcctttaactgcattaaataatgtaccaccagtttatccaaatggtcaaatttgggataaagaatttgatactgacttaaaaccaagacttcatgtaaatgcaccatttgtttgtcaaaataattgtcctggtcaattatttgtaaaagttgcgcctaatttaacaaatgaatatgatcctgatgcatctgctaatatgtcaagaattgtaacttactcagatttttggtggaaaggtaaattagtatttaaagctaaactaagagcctctcatacttggaatccaattcaacaaatgagtattaatgtagataaccaatttaactatgtaccaagtaatattggaggtatgaaaattgtatatgaaaaatctcaactagcacctagaaaattatattaa

SEQ ID NO: 339 - DNA, 4269 bp, Canine parvovirus 2a UY397
  source 1..4269: mol_type = genomic DNA; note = Canine parvovirus 2a UY397 / Protoparvovirus carnivoran 1 - OK888562
atgtctggcaaccagtatactgaggaagttatggagggagtaaattggttaaagaaacatgcagaaaatgaagcattttcatttgtttttaaatgtgacaacgtccaactaaatggaaaggatgttcgctggaacaactataccaaaccaattcaaaatgaagagctaacatctttaattagaggagcacaaacagcaatggatcaaaccgaagaagaagaaatggactgggaatcggaagttgatagtctcgccaaaaagcaagtacaaacttttgatgcattaattaaaaaatgtctttttgaagtctttgtttctaaaaatatagaaccaaatgaatgcgtttggtttattcaacatgaatggggaaaagatcaaggctggcattgtcatgttttacttcatagtaagaacttacaacaagcaactggtaaatggctacgcagacaaatgaatatgtattggagtagatggttggtgactctttgttcggtaaacttaacaccaactgaaaaaattaagctcagagaaattgcagaagatagtgaatgggtgactatattaacatacagacataagcaaacaaaaaaagactatgttaaaatggttcattttggaaatatgatagcatattactttttaacaaagaaaaaaattgtccacatgacaaaagaaagtggctattttttaagtactgattctggttggaaatttaactttatgaagtatcaagacagacaaattgtcagcacactttacactgaacaaatgaaaccagaaaccgttgaaaccacagtgacgacagcacaggaaacaaagcgcgggagaattcaaactaaaaaggaagtgtcaatcaaatgtactttgcgggacttggttagtaaaagagtaacatcacctgaagactggatgatgttacaaccagatagttatattgaaatgatggcacaaccaggaggtgaaaatcttttaaaaaatacacttgaaatttgtactttgactttagcaagaacaaaaacagcatttgaattaatacttgaaaaagcagataatactaaactaactaactttgatcttgcaaattctagaacatgtcaaatttttagaatgcacggatggaattggattaaagtttgtcacgctatagcatgtgttttaaatagacaaggtggcaaaagaaatacagttctttttcatggaccagcaagtacaggaaaatctatcattgctcaagccatagcacaagctgtgggtaatgttggttgttataatgcagcaaatgtaaattttccatttaatgactgtaccaataaaaatttaatttggattgaagaagctggtaactttggtcaacaagttaatcaatttaaagcaatttgttctggacaaacaattagaattgatcaaaaaggtaaaggaagtaagcaaattgaaccaactccagtaattatgacaactaatgaaaatataacaattgtgagaattggatgtgaagaaagacctgaacatacacaaccaataagagacagaatgttgaacatcaagttagtatgtaagcttccaggagactttggtttggttgataaagaagaatggcctttaatatgtgcatggttagttaaacatggttatgaatcaaccatggctaactatacacatcattggggaaaagtaccagaatgggatgaaaactgggcggagcctaaaatacaaaaaggtataaattcaccaggttgcaaagacttagagacgcaagcggcaagcaatcctcagagtcaagaccaagttctaactcctctgactccggacgtagtggaccttgcactggaaccgtggagtactccagatacgcctattgcagaaactgcaaatcaacaatcaaaccaacttggcgttactcacaaagacgtgcaagcgagtccaacgtggtccgaaatagaggcagacctgagagccatctttacttctgaacaattggaagaagattttcgagacgacttggattaaggtacgatggcacctccggcaaagagagccaggagaggtaagggtgtgttaataaggtggggggaggggaaagatttgataacttaactaagtatgtgtttttttataggacttgtgcctccaggttataaatatcttgggcctgggaacagtcttgaccaaggagaaccaactaacccttctgacgccgctgcaaaagaacacgacgaagcttacgctgcttatcttcgctctggtaaaaacccatacttatatttctcgccagcagatcaacgctttatagatcaaactaaggacgctaaagattggggggggaaaataggacattatttttttagagctaaaaaggcaattgctccagtattaactgatacaccagatcatccatcaacatcaagaccaacaaaaccaactaaaagaagtagaccaccacctcatattttcatcaatcttgcaaaaaaaaaaaaagccggtgcaggacaagtaaaaagagacaatcttgcaccaatgagtgatggagcagttcaaccagacggtggtcagcctgctgtcagaaatgaaagagctacaggatctgggaacgggtctggaggcgggggtggtggtggttctgggggtgtggggatttctacgggtactttcaataatcagacggaatttaaatttttggaaaacggatgggtggaaatcacagcaaactcaagcagacttgtacatttaaatatgccagaaagtgaaaattatagaagagtggttgtaaataatttggataaaactgcagttaacggaaacatggctttagatgatacccatgcacaaattgtaacaccttggtcattggttgatgcaaatgcttggggagtttggtttaatccaggagattggcaactaattgttaatactatgagtgagttgcatttagttagttttgaacaagaaatttttaatgttgttttaaagactgtttcagaatctgctactcagccaccaactaaagtttataataatgatttaactgcatcattgatggttgcattagatagtaataatactatgccatttactccagcagctatgagatctgagacattgggtttttatccatggaaaccaaccataccaactccatggagatattattttcaatgggatagaacattaataccatctcatactggaactagtggcacaccaacaaatatataccatggtacagatccagatgatgttcaattttacactattgaaaattctgtgccagtacacttactaagaacaggtgatgaatttgctacaggaacattttattttgattgtaaaccatgtagactaacacacacatggcaaacaaatagagcattgggcttaccaccatttctaaattctttgcctcaagctgaaggaggtactaactttggttatataggagttcaacaagataaaagacgtggtgtaactcaaatgggaaatacaaacattattactgaagctactattatgagaccagctgaggttggttatagtgcaccatattattcttttgaggcgtctacacaagggccatttaaaacacctattgcagcaggacgggggggagcgcaaacagatgaaaatcaagcagcagatggtgatccaagatatgcatttggtagacaacatggtcaaaaaactaccacaacaggagaaacacctgagagatttacatatatagcacatcaagatacaggaagatatccagaaggagattggattcaaaatattaactttaaccttcctgtaacaaatgataatgtattgctaccaacagatccaattggaggtaaagcaggaattaactatactaatatatttaatacttatggtcctttaactgcattaaataatgtaccaccagtttatccaaatggtcaaatttgggataaagaatttgatactgacttaaaaccaagacttcatgtaaatgcaccatttgtttgtcaaaataattgtcctggtcaattatttgtaaaagttgcgcctaatttaacaaatgaatatgatcctgatgcatctgctaatatgtcaagaattgtaacttactcagatttttggtggaaaggtaaattagtatttaaagctaaactaagagcctctcatacttggaatccaattcaacaaatgagtattaatgtagataaccaatttaactatgtaccaagtaatattggaggtatgaaaattgtatatgaaaaatctcaactagcacctagaaaattatactaa

SEQ ID NO: 340 - DNA, 4269 bp, Canine parvovirus 2a UY406
  source 1..4269: mol_type = genomic DNA; note = Canine parvovirus 2a UY406 / Protoparvovirus carnivoran 1 - OK888563
atgtctggcaaccagtatactgaggaagttatggagggagtaaattggttaaagaaacatgcagaaaatgaagcattttcatttgtttttaaatgtgacaacgtccaactaaatggaaaggatgttcgctggaacaactataccaaaccaattcaaaatgaagagctaacatctttaattagaggagcacaaacagcaatggatcaaaccgaagaagaagaaatggactgggaatcggaagttgatagtctcgccaaaaagcaagtacaaacttttgatgcattaattaaaaaatgtctttttgaagtctttgtttctaaaaatatagaaccaaatgaatgcgtttggtttattcaacatgaatggggaaaagatcaaggctggcattgtcatgttttacttcatagtaagaacttacaacaagcaactggtaaatggctacgcagacaaatgaatatgtattggagtagatggttggtgactctttgttcggtaaacttaacaccaactgaaaaaattaagctcagagaaattgcagaagatagtgaatgggtgactatattaacatacagacataagcaaacaaaaaaagactatgttaaaatggttcattttggaaatatgatagcatattactttttaacaaagaaaaaaattgtccacatgacaaaagaaagtggctattttttaagtactgattctggttggaaatttaactttatgaagtatcaagacagacaaattgtcagcacactttacactgaacaaatgaaaccagaaaccgttgaaaccacagtgacgacagcacaggaaacaaagcgcgggagaattcaaactaaaaaggaagtgtcaatcaaatgtactttgcgggacttggttagtaaaagagtaacatcacctgaagactggatgatgttacaaccagatagttatattgaaatgatggcacaaccaggaggtgaaaatcttttaaaaaatacacttgaaatttgtactttgactttagcaagaacaaaaacagcatttgaattaatacttgaaaaagcagataatactaaactaactaactttgatcttgcaaattctagaacatgtcaaatttttagaatgcacggatggaattggattaaagtttgtcacgctatagcatgtgttttaaatagacaaggtggcaaaagaaatacagttctttttcatggaccagcaagtacaggaaaatctatcattgctcaagccatagcacaagctgtgggtaatgttggttgttataatgcagcaaatgtaaattttccatttaatgactgtaccaataaaaatttaatttggattgaagaagctggtaactttggtcaacaagttaatcaatttaaagcaatttgttctggacaaacaattagaattgatcaaaaaggtaaaggaagtaagcaaattgaaccaactccagtaattatgacaactaatgaaaatataacaattgtgagaattggatgtgaagaaagacctgaacatacacaaccaataagagacagaatgttgaacatcaagttagtatgtaagcttccaggagactttggtttggttgataaagaagaatggcctttaatatgtgcatggttagttaaacatggttatgaatcaaccatggctaactatacacatcattggggaaaagtaccagaatgggatgaaaactgggcggagcctaaaatacaaaaaggtataaattcaccaggttgcaaagacttagagacgcaagcggcaagcaatcctcagagtcaagaccaagttctaactcctctgactccggacgtagtggaccttgcactggaaccgtggagtactccagatacgcctattgcagaaactgcaaatcaacaatcaaaccaacttggcgttactcacaaagacgtgcaagcgagtccaacgtggtccgaaatagaggcagacctgagagccatctttacttctgaacaattggaagaagattttcgagacgacttggattaaggtacgatggcacctccggcaaagagagccaggagaggtaagggtgtgttaataaggtggggggaggggaaagatttgataacttaactaagtatgtgtttttttataggacttgtgcctccaggttataaatatcttgggcctgggaacagtcttgaccaaggagaaccaactaacccttctgacgccgctgcaaaagaacacgacgaagcttacgctgcttatcttcgctctggtaaaaacccatacttatatttctcgccagcagatcaacgctttatagatcaaactaaggacgctaaagattggggggggaaaataggacattatttttttagagctaaaaaggcaattgctccagtattaactgatacaccagatcatccatcaacatcaagaccaacaaaaccaactaaaagaagtagaccaccacctcatattttcatcaatcttgcaaaaaaaaaaaaagccggtgcaggacaagtaaaaagagacaatcttgcaccaatgagtgatggagcagttcaaccagacggtggtcagcctgctgtcagaaatgaaagagctacaggatctgggaacgggtctggaggcgggggtggtggtggttctgggggtgtggggatttctacgggtactttcaataatcagacggaatttaaatttttggaaaacggatgggtggaaatcacagcaaactcaagcagacttgtacatttaaatatgccagaaagtgaaaattatagaagagtggttgtaaataatttggataaaactgcagttaacggaaacatggctttagatgatacccatgcacaaattgtaacaccttggtcattggttgatgcaaatgcttggggagtttggtttaatccaggagattggcaactaattgttaatactatgagtgagttgcatttagtcagttttgaacaagaaatttttaatgttgttttaaagactgtttcagaatctgctactcagccaccaactaaagtttataataatgatttaactgcatcattgatggttgcattagatagtaataatactatgccatttactccagcagctatgagatctgagacattgggtttttatccatggaaaccaaccataccaactccatggagatattattttcaatgggatagaacattaataccatctcatactggaactagtggcacaccaacaaatatataccatggtacagatccagatgatgttcaattttacactattgaaaattctgtgccagtacacttactaagaacaggtgatgaatttgctacaggaacattttattttgattgtaaaccatgtagactaacacacacatggcaaacaaatagagcattgggcttaccaccatttctaaattctttgcctcaagctgaaggaggtactaactttggttatataggagttcaacaagataaaagacgtggtgtaactcaaatgggaaatacaaacattattactgaagctactattatgagaccagctgaggttggttatagtgcaccatattattcttttgaggcgtctacacaagggccatttaaaacacctattgcagcaggacgggggggagcgcaaacagatgaaaatcaagcagcagatggtgatccaagatatgcatttggtagacaacatggtcaaaaaactaccacaacaggagaaacacctgagagatttacatatatagcacatcaagatacaggaagatatccagaaggagattggattcaaaatattaactttaaccttcctgtaacaaatgataatgtattgctaccaacagatccaattggaggtaaagcaggaattaactatactaatatatttaatacttatggtcctttaactgcattaaataatgtaccaccagtttatccaaatggtcaaatttgggataaagaatttgatactgacttaaaaccaagacttcatgtaaatgcaccatttgtttgtcaaaataattgtcctggtcaattatttgtaaaagttgcgcctaatttaacaaatgaatatgatcctgatgcatctgctaatatgtcaagaattgtaacttactcagatttttggtggaaaggtaaattagtatttaaagctaaactaagagcctctcatacttggaatccaattcaacaaatgagtattaatgtagataaccaatttaactatgtaccaagtaatattggaggtatgaaaattgtatatgaaaaatctcaactagcacctagaaaattatactaa

SEQ ID NO: 341 - DNA, 4269 bp, Canine parvovirus 2c UY408
  source 1..4269: mol_type = genomic DNA; note = Canine parvovirus 2c UY408 / Protoparvovirus carnivoran 1 - OK888564
atgtctggcaaccagtatactgaggaagttatggagggagtaaattggttaaagaaacatgcagaaaatgaagcattttcgtttgtttttaaatgtgacaacgtccaactaaatggaaaggatgttcgctggaacaactataccaaaccaattcaaaatgaagagctaacatctttaattagaggagcacaaacagcaatggatcaaaccgaagaagaagaaatggactgggaatcggaagttgatagtctcgccaaaaagcaagtacaaacttttgatgcactaattaaaaaatgtctttttgaagtctttgtttctaaaaatatagaaccaaatgaatgtgtttggtttattcaacatgaatggggaaaagatcaaggctggcattgtcatgttttacttcatagtaagaacttacaacaagcaactggtaaatggctacgcagacaaatgaatatgtattggagtagatggttggtgactctttgttcggtaaacttaacaccaactgaaaagattaagctcagagaaattgcagaagatagtgaatgggtgactatattaacatacagacataagcaaacaaaaaaagactatgttaaaatggttcattttggaaatatgatagcatattactttttaacaaagaaaaaaattgtccacatgacaaaagaaagtggctattttttaagtactgattctggttggaaatttaactttatgaagtatcaagacagacaaattgtcagcacactttacactgaacaaatgaaaccagaaaccgttgaaaccacagtgacgacagcacaggaaacaaagcgcgggagaattcaaactaaaaaggaagtgtcaatcaaatgtactttgcgggacttggttagtaaaagagtaacatcacctgaagactggatgatgttacaaccagatagttatattgaaatgatggcacaaccaggaggtgaaaatcttttaaaaaatacacttgaaatttgtactttgactttagcaagaacaaaaacagcatttgaattaatacttgaaaaagcagataatactaaactgactaactttgatcttgcaaattctagaacatgtcagatttttagaatgcacggatggaattggattaaagtttgtcacgctatagcatgtgttttaaatagacaaggtggtaaaagaaatacagttctttttcatggaccagcaagtacaggaaaatctatcattgctcaagccatagcacaagctgtgggtaatgttggttgttataatgcagcaaatgtaaattttccatttaatgactgtaccaataaaaatttaatttggattgaagaagctggtaactttggtcaacaagttaatcaatttaaagcaatttgttctggacaaacaattagaattgatcaaaaaggtaaaggaagtaagcaaattgaaccaactccagtaattatgacaactaatgaaaatataacaattgtgagaattggatgtgaagaaagacctgaacatacacaaccaataagagacagaatgttgaacattaagttagtatgtaagcttccaggagactttggtttggttgataaagaagaatggcctttaatatgtgcatggttagttaaacatggttatgaatcaaccatggctaactatacacatcattggggaaaagtaccagaatgggatgaaaactgggcggagcctaaaatacaagaaggtataaattcaccaggttgcaaagacttagagacgcaagcggcaagcaatcctcagagtcaagaccaagttctaactcctctgactccggacgtagtggaccttgcactggaaccgtggagtactccagatacgcctattgcagaaactgcaaatcagcaatcaaaccaacttggcgttactcacaaagacgtgcaagcgagtccaacgtggtccgaaatagaggcagacctgagagccatctttacttctgaacaactggaagaagattttcgagacgacttggattaaggtacgatggcacctccggcaaagagagccaggagaggtaagggtgtgttagtaaagtggggggaggggaaagatttagtaacttaactaagtatgtgtttttttataggacttgtgcctccaggttataaatatcttgggcctgggaacagtcttgaccaaggagagccaactaacccttctgacgccgctgcaaaagaacacgacgaagcttacgctgcttatcttcgctctggtaaaaacccatacttatatttctcgccagcagatcaacgctttatagatcaaactaaggacgctaaagattggggggggaaaataggacattatttttttagagctaaaaaggcaattgctccagtattaactgatacaccagatcatccatcaacatcaagaccaacaaaaccaactaaaagaagtaaaccaccacctcatattttcatcaatcttgcaaaaaaaaaaaaagccggtgcaggacaagtaaaaagagacaatcttgcaccaatgagtgatggagcagttcaaccagacggtggtcaacctgctgtcagaaatgaaagagcaacaggatctgggaacgggtctggaggcgggggtggtggtggttctgggggtgtggggatttctacgggtactttcaataatcagacggaatttaaatttttggaaaacggatgggtggaaatcacagcaaactcaagcagacttgtacatttaaatatgccagaaagtgaaaattatagaagagtggttgtaaataatttggataaaactgcagttaacggaaacatggctttagatgatactcatgcacaaattgtaacaccttggtcattggttgatgcaaatgcttggggagtttggtttaatccaggagattggcaactaattgttaatactatgagtgagttgcatttagttagttttgaacaagaaatttttaatgttgttttaaagactgtttcagaatctgctactcagccaccaactaaagtttataataatgatttaactgcatcattgatggttgcattagatagtaataatactatgccatttactccagcagctatgagatctgagacattgggtttttatccatggaaaccaaccataccaactccatggagatattattttcaatgggatagaacattaataccatctcatactggaactagtggcacaccaacaaatatataccatggtacagatccagatgatgttcaattttatactattgaaaattctgtgccagtacacttactaagaacaggtgatgaatttgctacaggaacatttttttttgattgtaaaccatgtagactaacacatacatggcaaacaaatagagcattgggcttaccaccatttctaaattctttgcctcaagctgaaggaggtactaactttggttatataggagttcaacaagataaaagacgtggtgtaactcaaatgggaaatacaaactatattactgaagctactattatgagaccagctgaggttggttatagtgcaccatattattcttttgaggcgtctacacaagggccatttaaaacacctattgcagcaggacgggggggagcgcaaacagatgaaaatcaagcagcagatggtgatccaagatatgcatttggtagacaacatggtcaaaaaactaccacaacaggagaaacacctgagagatttacatatatagcacatcaagatacaggaagatatccagaaggagattggattcaaaatattaactttaaccttcctgtaacagaagataatgtattgctaccaacagatccaattggaggtaaaacaggaattaactatactaatatatttaatacttatggtcctttaactgcattaaataatgtaccaccagtttatccaaatggtcaaatttgggataaagaatttgatactgacttaaaaccaagacttcatgtaaatgcaccatttgtttgtcaaaataattgtcccggtcaattatttgtaaaagttgcgcctaatttaacaaatgaatatgatcctgatgcatctgctaatatgtcaagaattgtaacttactcagatttttggtggaaaggtaaattagtatttaaagctaaactaagagcctctcatacttggaatccaattcaacaaatgagtattaatgtagataaccaatttaactatgtaccaagtaatattggaggtatgaaaattgtatatgaaaaatctcaactagcacctagaaaattatattaa

SEQ ID NO: 342 - DNA, 4269 bp, Canine parvovirus 2c UY410
  source 1..4269: mol_type = genomic DNA; note = Canine parvovirus 2c UY410 / Protoparvovirus carnivoran 1 - OK888565
atgtctggcaaccagtatactgaggaagttatggagggagtaaattggttaaagaaacatgcagaaaatgaagcattttcgtttgtttttaaatgtgacaacgttcaactaaatggaaaggatgttcgctggaacaactataccaaaccaattcaaaatgaagagctaacatctttaattagaggagcacaaacagcaatggatcaaaccgaagaagaagaaatggactgggaatcggaagttgatagtctcgccaaaaagcaagtacaaacttttgatgcattaattaaaaaatgtctttttgaagtctttgtttctaaaaatatagaaccaaatgaatgtgtttggtttattcaacatgaatggggaaaagatcaaggctggcattgtcatgttttacttcatagtaagaacttacaacaagcaactggtaaatggctacgcagacaaatgaatatgtattggagtagatggttggtgactctttgttcggtaaacttaacaccaactgaaaagattaagctcagagaaattgcagaagatagtgaatgggtgactatattaacatacagacataagcaaacaaaaaaagactatgttaaaatggttcattttggaaatatgatagcatattactttttaacaaagaaaaaaattgtccacatgacaaaagaaagtggctattttttaagtactgattctggttggaaatttaactttatgaagtatcaagacagacaaattgtcagcacactttacactgaacaaatgaaaccagaaaccgttgaaaccacagtgacgacagcacaggaaacaaagcgcgggagaattcaaactaaaaaggaagtgtcaatcaaatgtactttgcgggacttggttagtaaaagagtaacatcacctgaagactggatgatgttacaaccagatagttatattgaaatgatggcacaaccaggaggtgaaaatcttttaaaaaatacacttgaaatttgtactttgactttagcaagaacaaaaacagcatttgaattaatacttgaaaaagcagataaaactaaactgactaactttgatcttgcaaattctagaacatgtcagatttttagaatgcacggatggaattggattaaagtttgtcacgctatagcatgtgttttaaatagacaaggtggtaaaagaaatacagttctttttcatggaccagcaagtacaggaaaatctatcattgctcaagccatagcacaagctgtgggtaatgttggttgttataatgcagcaaatgtaaattttccatttaatgactgtaccaataaaaatttaatttggattgaagaagctggtaactttggtcaacaagttaatcaatttaaagcaatttgttctggacaaacaattagaattgatcaaaaaggtaaaggaagtaagcaaattgaaccaactccagtaattatgacaactaatgaaaatataacaattgtgagaattggatgtgaagaaagacctgaacatacacaaccaataagagacagaatgttgaacattaagttagtatgtaagcttccaggagactttggtttggttgataaagaagaatggcctttaatatgtgcatggttagttaaacatggttatgaatcaaccatggctaactatacacatcattggggaaaagtaccagaatgggatgaaaactgggcggagcctaaaatacaagaaggtataaattcaccaggttgcaaagacttagagacgcaagcggcaagcaatcctcagagtcaagaccaagttctaactcctctgactccggacgtagtggaccttgcactggaaccgtggagtactccagatacgcctattgcagaaactgcaaatcagcaatcaaaccaacttggcgttactcacaaagacgtgcaagcgagtccaacgtggtccgaaatagaggcagacctgagagccatctttacttctgaacaactggaagaagattttcgagacgacttggattaaggtacgatggcacctccggcaaagagagccaggagaggtaagggtgtgttagtaaagtggggggaggggaaagatttagtaacttaactaagtatgtgtttttttataggacttgtgcctccaggttataaatatcttgggcctgggaacagtcttgaccaaggagaaccaactaacccttctgacgccgctgcaaaagaacacgacgaagcttacgctgcttatcttcgctctggtaaaaacccatacttatatttctcgccagcagatcaacgctttatagatcaaactaaggacgctaaagattggggggggaaaataggacattatttttttagagctaaaaaggcaattgctccagtattaactgatacaccagatcatccatcaacatcaagaccaacaaaaccaactaaaagaagtaaaccaccacctcatattttcatcaatcttgcaaaaaaaaaaaaagccggtgcaggacaagtaaaaagagacaatcttgcaccaatgagtgatggagcagttcaaccagacggtggtcaacctgctgtcagaaatgaaagagcaacaggatctgggaacgggtctggaggcgggggtggtggtggttctgggggtgtggggatttctacgggtactttcaataatcagacggaatttaaatttttggaaaacggatgggtggaaatcacagcaaactcaagcagacttgtacatttaaatatgccagaaagtgaaaattatagaagagtggttgtaaataatttggataaaactgcagttaacggaaacatggctttagatgatactcatgcacaaattgtaacaccttggtcattggttgatgcaaatgcttggggagtttggtttaatccaggagattggcaactaattgttaatactatgagtgagttgcatttagttagttttgaacaagaaatttttaatgttgttttaaagactgtttcagaatctgctactcagccaccaactaaagtttataataatgatttaactgcatcattgatggttgcattagatagtaataatactatgccatttactccagcagctatgagatctgagacattgggtttttatccatggaaaccaaccataccaactccatggagatattattttcaatgggatagaacattaataccatctcatactggaactagtggcacaccaacaaatatataccatggtacagatccagatgatgttcaattttatactattgaaaattctgtgccagtacacttactaagaacaggtgatgaatttgctacaggaacatttttttttgattgtaaaccatgtagactaacacatacatggcaaacaaatagagcattgggcttaccaccatttctaaattctttgcctcaagctgaaggaggtactaactttggttatataggagttcaacaagataaaagacgtggtgtaactcaaatgggaaatacaaactatattactgaagctactattatgagaccagctgaggttggttatagtgcaccatattattcttttgaggcgtctacacaagggccatttaaaacacctattgcagcaggacgggggggagcgcaaacagatgaaaatcaagcagcagatggtgatccaagatatgcatttggtagacaacatggtcaaaaaactaccacaacaggagaaacacctgagagatttacatatatagcacatcaagatacaggaagatatccagaaggagattggattcaaaatattaactttaaccttcctgtaacagaagataatgtattgctaccaacagatccaattggaggtaaaacaggaattaactatactaatatatttaatacttatggtcctttaactgcattaaataatgtaccaccagtttatccaaatggtcaaatttgggataaagaatttgatactgacttaaaaccaagacttcatgtaaatgcaccatttgtttgtcaaaataattgtcctggtcaattatttgtaaaagttgcgcctaatttaacaaatgaatatgatcctgatgcatctgctaatatgtcaagaattgtaacttactcagatttttggtggaaaggtaaattagtatttaaagctaaactaagagcctctcatacttggaatccaattcaacaaatgagtattaatgtagataaccaatttaactatgtaccaagtaatattggaggtatgaaaattgtatatgaaaaatctcaactagcacctagaaaattatattaa

SEQ ID NO: 343 - DNA, 4269 bp, Canine parvovirus 2c UY423
  source 1..4269: mol_type = genomic DNA; note = Canine parvovirus 2c UY423 / Protoparvovirus carnivoran 1 - OK888566
atgtctggcaaccagtatactgaggaagttatggagggagtaaattggttaaagaaacatgcagaaaatgaagcattttcgtttgtttttaaatgtgacaacgtccaactaaatggaaaggatgttcgctggaacaactataccaaaccaattcaaaatgaagagctaacatctttgattagaggagcacaaacagcaatggatcaaaccgaagaagaagaaatggactgggaatcggaagttgatagtctcgccaaaaagcaagtacaaacttttgatgcattaattaaaaaatgtctttttgaagtctttgtttctaaaaatatagaaccaaatgaatgtgtttggtttattcaacatgaatggggaaaagatcaaggctggcattgtcatgttttacttcatagtaagaacttacaacaagcaactggtaaatggctacgcagacaaatgaacatgtattggagtagatggttggtgactctttgttcggtaaacttaacaccaactgaaaagattaagctcagagaaattgcagaagatagtgaatgggtgactatattaacatacagacataagcaaacaaaaaaagactatgttaaaatggttcattttggaaatatgatagcatattactttttaacaaagaaaaaaattgtccacatgacaaaagaaagtggctattttttaagtactgattctggttggaaatttaactttatgaagtatcaagacagacaaattgtcagcacactttacactgaacaaatgaaaccagaaaccgttgaaaccacagtgacgacagcacaggaaacaaagcgcgggagaattcaaactaaaaaggaagtgtcaatcaaatgtactttgcgagacttggttagtaaaagagtaacatcacctgaagactggatgatgttacaaccagatagttatattgaaatgatggcacaaccaggaggtgaaaatcttttaaaaaatacacttgaaatttgtactttgactttagcaagaacaaaaacagcatttgaattaatacttgaaaaagcagataaaactaaactaactaactttgatcttgcaagttctagaacatgtcaaatttttagaatgcacggatggaattggattaaagtttgtcacgctatagcatgtgttttaaatagacaaggtggtaaaagaaatacagttctttttcatggaccagcaagtacaggaaaatctatcattgctcaagccatagcacaagctgtgggtaatgttggttgttataatgcagcaaatgtaaattttccatttaatgactgtaccaataaaaatttaatttggattgaagaagctggtaactttggtcagcaagttaatcaatttaaagcaatctgttctggacaaacaattagaatcgatcaaaaaggtaaaggaagtaagcaaattgaaccaactccagtaattatgacaactaatgaaaatataacaattgtgagaattggatgtgaagagagacctgaacatacacaaccaataagagacagaatgttgaacattaagttagtatgtaagcttccaggagactttggtttggttgataaagaagaatggcctttaatatgtgcatggttagttaaacatggttatgaatcaaccatggctaactatacacatcattggggaaaagtaccagaatgggatgaaaactgggcggagcctaaaatacaagaaggtataaattcaccaggttgcaaagacttagagacgcaagcggcaagcaatcctcagagtcaagaccaagttctaactcctctgactccggacgtagtggaccttgcactggaaccgtggagtactccagatacgcctattgcagaaactgcaaatcagcaatcaaaccaacttggcgttactcacaaagacgtgcaagcgagtccaacgtggtccgaaatagaggcagacctgagagccatctttacttctgaacaactggaagaagattttcgagacgacttggattaaggtacgatggcacctccggcaaagagagccaggagaggtaagggtgtgttagtaaagtggggggaggggaaagatttagtaacttaactaagtatgtgtttttttataggacttgtgcctccaggttataaatatcttgggcctgggaacagtcttgaccaaggagaaccaactaacccttcagacgccgctgcaaaagaacacgacgaagcttacgctgcttatcttcgctctggtaaaaacccatacttatatttctcgccagcagatcaacgctttatagatcaaactaaggacgctaaagattggggggggaaaataggacattatttttttagagctaaaaaggcaattgctccagtattaactgatacaccagatcatccatcaacatcaagaccaacaaaaccaactaaaagaagtaaaccaccacctcatattttcatcaatcttgcaaaaaaaaaaaaagccggtgcaggacaagtaaaaagagacaatcttgcaccaatgagtgatggagcagttcaaccagacggtggtcaacctgctgtcagaaatgaaagagcaacaggatctgggaacgggtctggaggcgggggtggtggtggttctgggggtgtggggatttctacgggtactttcaataatcagacggaatttaaatttttggaaaacggatgggtggaaatcacagcaaactcaagcagacttgtacatttaaatatgccagaaagtgaaaattataggagagtggttgtaaataatttggataaaactgcagttaacggaaacatggctttagatgatactcatgcacaaattgtaacaccttggtcattggttgatgcaaatgcttggggagtttggtttaatccaggagattggcaactaattgttaatactatgagtgagttgcatttagttagttttgaacaagaaatttttaatgttgttttaaagactgtttcagaatctgctactcagccaccaactaaagtttataataatgatttaactgcatcattgatggttgcattagatagtaataatactatgccatttactccagcagctatgagatctgagacattaggtttttatccatggaaaccaaccataccaactccatggagatattattttcaatgggatagaacattaataccatctcatactggaactagtggcacaccaacaaatatataccatggtacagatccagatgatgttcaattttatactattgaaaattctgtgccagtacacttactaagaacaggtgatgaatttgctacaggaacatttttttttgattgtaaaccatgtagactaacacatacatggcaaacaaatagagcattgggcttaccaccatttctaaattctttgcctcaagctgaaggaggtactaactttggttatataggagttcaacaagataaaagacgtggtgtaactcaaatgggaaatacaaactatattactgaagctactattatgagaccagctgaggttggttatagtgcaccatattattcttttgaggcgtctacacaagggccatttaaaacacctattgcagcaggacgggggggagcgcaaacagatgaaaatcaagcagcagatggtgatccaagatatgcatttggtagacaacatggtcaaaaaactaccacaacaggagaaacacctgagagatttacatatatagcacatcaagatacaggaagatatccagaaggagattggattcaaaatattaactttaaccttcctgtaacagaagataatgtattgctaccaacagatccaattggaggtaaaacaggaattaactatactaatatatttaatacttatggtcctttaactgcattaaataatgtaccaccagtttatccaaatggtcaaatttgggataaagaatttgatactgacttaaagccaagacttcatgtaaatgcaccatttgtttgtcaaaataattgtcctggtcaattatttgtaaaagttgcgcctaatttaacaaatgaatatgatcctgatgcatctgctaatatgtcaagaattgtaacttactcagatttttggtggaaaggtaaattagtatttaaagctaaactaagagcctctcatacttggaacccaattcaacaaatgagtattaatgtagataaccaatttaactatgtaccaagtaatattggaggtatgaaaattgtatatgaaaaatctcaactagcacctagaaaattatattaa

SEQ ID NO: 344 - DNA, 4269 bp, Canine parvovirus 2c UY426
  source 1..4269: mol_type = genomic DNA; note = Canine parvovirus 2c UY426 / Protoparvovirus carnivoran 1 - OK888567
atgtctggcaaccagtatactgaggaagttatggagggagtaaattggctaaagaaacatgcagaaaatgaagcattttcgtttgtttttaaatgtgacaacgtccaactaaatggaaaggatgttcgctggaacaactataccaaaccaattcaaaatgaagagctaacatctttgattagaggagcacaaacagcaatggatcaaaccgaagaagaagaaatggactgggaatcggaagttgatagtctcgccaaaaagcaagtacaaacttttgatgcattaattaaaaaatgtctttttgaagtctttgtttctaaaaatatagaaccaaatgaatgtgtttggtttattcaacatgaatggggaaaagatcaaggctggcattgtcatgttttacttcatagtaagaacttacaacaagcaactggtaaatggctacgcagacaaatgaatatgtattggagtagatggttggtgactctttgttcggtaaacttaacaccaactgaaaagattaagctcagagaaattgcagaagatagtgaatgggtgactatattaacatacagacataagcaaacaaaaaaagactatgttaaaatggttcattttggaaatatgatagcatattactttttaacaaagaaaaaaattgtccacatgacaaaagaaagtggctattttttaagtactgattctggttggaaatttaactttatgaagtatcaagacagacaaattgtcagcacactttacactgaacaaatgaaaccagaaaccgttgaaaccacagtgacgacagcacaggaaacaaagcgcgggagaattcaaactaaaaaggaagtgtcaatcaaatgtactttgcgggacttggttagtaaaagagtaacatcacctgaagactggatgatgttacaaccagatagttatattgaaatgatggcacaaccaggaggtgaaaatcttttaaaaaatacacttgaaatttgtactttgactttagcaagaacaaaaacagcatttgaattaatacttgaaaaagcagataaaactaaactaactaactttaaccttgcaaattctagaacatgtcaaatttttagaatgcacggatggaattggattaaagtttgtcacgctatagcatgtgttttaaatagacaaggtggtaaaagaaatacagttctttttcatggaccagcaagtacaggaaaatctatcattgctcaagccatagcacaagctgtgggtaatgttggttgttacaatgcagcaaatgtaaattttccatttaatgactgtaccaataaaaatttaatttggattgaagaagctggtaactttggtcagcaagttaatcaatttaaagcaatttgttctggacaaacaattagaattgatcaaaaaggtaaaggaagtaagcaaattgaaccaactccagtaattatgacaactaatgaaaatataacaattgtgagaattggatgtgaagaaagacctgaacatacacaaccaataagagacagaatgttgaacattaagttagtatgtaagcttccaggagactttggtttggttgataaagaagaatggcctttaatatgtgcatggttagttaaacatggttatgaatcaaccatggctaactatacacatcattggggaaaagtaccagaatgggatgaaaactgggcggagcctaaaatacaagaaggtataaattcaccaggttgcaaagacttagagacgcaagcggcaagcaatcctcagagtcaagaccaagttctaactcctctgactccggacgtagtggaccttgcactggaaccgtggagtactccagatacgcctattgcagaaactgcaaatcagcaatcaaaccaacttggcgttactcacaaagacgtgcaagcgagtccaacgtggtccgaaatagaggcagacctgagagccatctttacttctgaacaactggaagaagattttcgagacgacttggattaaggtacgatggcacctccggcaaagagagccaggagaggtaagggtgtgttagtaaagtggggggaggggaaagatttagtgacttaactaagtatgtgtttttttataggacttgtgcctccaggttataaatatcttgggcctgggaacagtcttgaccaaggagaaccaactaacccttctgacgccgctgcaaaagaacacgacgaagcttacgctgcttatcttcgctctggtaaaaacccatacttatatttctcgccagcagatcaacgctttatagatcaaactaaggacgctaaagattggggggggaaaataggacattatttttttagagctaaaaaggcaattgctccagtattaactgatacaccagatcatccatcaacatcaagaccaacaaaaccaactaaaagaagtaaaccaccacctcatattttcatcaatcttgcaaaaaaaaaaaaagccggggcaggacaagtaaaaagagacaatcttgcaccaatgagtgatggagcagttcaaccagacggtggtcaacctgctgtcagaaatgaaagagcaacaggatctgggaacgggtctggaggcgggggtggtggtggttctgggggtgtggggatttctacgggtactttcaataatcagacggaatttaaatttttggaaaacggatgggtggaaatcacagcaaactcaagcagacttgtacatttaaatatgccagaaagtgaaaattatagaagagtggttgtaaataatttggataaaactgcagttaacggaaacatggctttagatgatactcatgcacaaattgtaacaccttggtcattggttgatgcaaatgcttggggagtttggtttaatccaggagattggcaactaattgttaatactatgagtgagttgcatttagttagttttgaacaagaaatttttaatgttgttttaaagactgtttcagaatctgctactcagccaccaactaaagtttataataatgatttaactgcatcattgatggttgcattagatagtaataatactatgccatttactccagcagctatgagatctgagacattgggtttttatccatggaaaccaaccataccaactccatggagatattattttcaatgggatagaacattaataccatctcatactggaaccagtggcacaccaacaaatatataccatggtacagatccagatgatgttcaattttatactattgaaaattctgtgccagtacacttactaagaacaggtgatgaatttgctacaggaacatttttttttgattgtaaaccatgtagactaacacatacatggcaaacaaatagagcattgggcttaccaccatttctaaattctttgcctcaagctgaaggaggtactaactttggttatataggagttcaacaagataaaagacgtggtgtaactcaaatgggaaatacaaactatattactgaagctactattatgagaccagctgaggttggttatagtgcaccatattattcttttgaggcgtctacacaagggccatttaaaacacctattgcagcaggacgggggggagcgcaaacagatgaaaatcaagcagcagatggtgatccaagatatgcatttggtagacaacatggtcaaaaaactaccacaacaggagaaacacctgagagatttacatatatagcacatcaagatacaggaagatatccagaaggagattggattcaaaatattaactttaaccttcctgtaacagaagataatgtattgctaccaacagatccaattggaggtaaagcaggaattaactatactaatatatttaatacttatggtcctttaactgcattaaataatgtaccaccagtttatccaaatggtcaaatttgggataaagaatttgatactgacttaaaaccaagacttcatgtaaatgcaccatttgtttgtcaaaataattgtcctggtcaattatttgtaaaagttgcgcctaatttaacaaatgaatatgatcctgatgcatctgctaatatgtcaagaattgtaacttactcagatttttggtggaaaggtaaattagtatttaaagctaaactaagagcctctcatacttggaatccaattcaacaaatgagtattaatgtagataaccaatttaactatgtaccaagtaatattggaggtatgaaaattgtatatgaaaaatctcaactagcacctagaaaattatattaa

SEQ ID NO: 345 - DNA, 4269 bp, Canine parvovirus 2a UY427
  source 1..4269: mol_type = genomic DNA; note = Canine parvovirus 2a UY427 / Protoparvovirus carnivoran 1 - OK888568
atgtctggcaaccagtatactgaggaagttatggagggagtaaattggttaaagaaacatgcagaaaatgaagcattttcatttgtttttaaatgtgacaacgtccaactaaatggaaaggatgttcgctggaacaactataccaaaccaattcaaaatgaagagctaacatctttaattagaggagcacaaacagcaatggatcaaaccgaagaagaagaaatggactgggaatcggaagttgatagtctcgccaaaaagcaagtacaaacttttgatgcattaattaaaaaatgtctttttgaagtctttgtttctaaaaatatagaaccaaatgaatgcgtttggtttattcaacatgaatggggaaaagatcaaggctggcattgtcatgttttacttcatagtaagaacttacaacaagcaactggtaaatggctacgcagacaaatgaatatgtattggagtagatggttggtgactctttgttcggtaaacttaacaccaactgaaaaaattaagctcagagaaattgcagaagatagtgaatgggtgactatattaacatacagacataagcaaacaaaaaaagactatgttaaaatggttcattttggaaatatgatagcatattactttttaacaaagaaaaaaattgtccacatgacaaaagaaagtggctattttttaagtactgattctggttggaaatttaactttatgaagtatcaagacagacaaattgtcagcacactttacactgaacaaatgaaaccagaaaccgttgaaaccacagtgacgacagcacaggaaacaaagcgcgggagaattcaaactaaaaaggaagtgtcaatcaaatgtactttgcgggacttggttagtaaaagagtaacatcacctgaagactggatgatgttacaaccagatagttatattgaaatgatggcacaaccaggaggtgaaaatcttttaaaaaatacacttgaaatttgtactttgactttagcaagaacaaaaacagcatttgaattaatacttgaaaaagcagataatactaaactaactaactttgatcttgcaaattctagaacatgtcaaatttttagaatgcacggatggaattggattaaagtttgtcacgctatagcatgtgttttaaatagacaaggtggcaaaagaaatacagttctttttcatggaccagcaagtacaggaaaatctatcattgctcaagccatagcacaagctgtgggtaatgttggttgttataatgcagcaaatgtaaattttccatttaatgactgtaccaataaaaatttaatttggattgaagaagctggtaactttggtcaacaagttaatcaatttaaagcaatctgttctggacaaacaattagaattgatcaaaaaggtaaaggaagtaagcaaattgaaccaactccagtaattatgacaactaatgaaaatataacaattgtgagaattggatgtgaagaaagacctgaacatacacaaccaataagagacagaatgttgaacatcaagttagtatgtaagcttccaggagactttggtttggttgataaagaagaatggcctttaatatgtgcatggttagttaaacatggttatgaatcaaccatggctaactatacacatcattggggaaaagtaccagaatgggatgaaaactgggcggagcctaaaatacaaaaaggtataaattcaccaggttgcaaagacttagagacgcaagcggcaagcaatcctcagagtcaagaccaagttctaactcctctgactccggacgtagtggaccttgcactggaaccgtggagtactccagatacgcctattgcagaaactgcaaatcaacaatcaaaccaacttggcgttactcacaaagacgtgcaagcgagtccaacgtggtccgaaatagaggcagacctgagagccatctttacttctgaacaattggaagaagattttcgagacgacttggattaaggtacgatggcacctccggcaaagagagccaggagaggtaagggtgtgttaataaggtggggggaggggaaagatttgataacttaactaagtatgtgtttttttataggacttgtgcctccaggttataaatatcttgggcctgggaacagtcttgaccaaggagaaccaactaacccttctgacgccgctgcaaaagaacacgacgaagcttacgctgcttatcttcgctctggtaaaaacccatacttatatttctcgccagcagatcaacgctttatagatcaaactaaggacgctaaagattggggggggaaaataggacattatttttttagagctaaaaaggcaattgctccagtattaactgatacaccagatcatccatcaacatcaagaccaacaaaaccaactaaaaaaagtagaccaccacctcatattttcatcaatcttgcaaaaaaaaaaaaagccggtgcaggacaagtaaaaagagacaatcttgcaccaatgagtgatggagcagttcaaccagacggtggtcagcctgctgtcagaaatgaaagagctacaggatctgggaacgggtctggaggcgggggtggtggtggttctgggggtgtggggatttctacgggtactttcaataatcaaacggaatttaaatttttggaaaacggatgggtggaaatcacagcaaactcaagcagacttgtacatttaaatatgccagaaagtgaaaattatagaagagtggttgtaaataatttggataaaactgcagttaacggaaacatggctttagatgatacccatgcacaaattgtaacaccttggtcattggttgatgcaaatgcttggggagtttggtttaatccaggagattggcaactaattgttaatactatgagtgagttgcatttagttagttttgaacaagaaatttttaatgttgttttaaagactgtttcagaatctgctactcagccaccaactaaagtttataataatgatttaactgcatcattgatggttgcattagatagtaataatactatgccatttactccagcagctatgagatctgagacattgggtttttatccatggaaaccaaccataccaactccatggagatattattttcaatgggatagaacattaataccatctcatactggaactagtggcacaccaacaaatatataccatggtacagatccagatgatgttcaattttacactattgaaaattctgtgccagtacacttactaagaacaggtgatgaatttgctacaggaacattttattttgattgtaaaccatgtagactaacacacacatggcaaacaaatagagcattgggcttaccaccatttctaaattctttgcctcaagctgaaggaggtactaactttggttatataggagttcaacaagataaaagacgtggtgtaactcaaatgggaaatacaaacattattactgaagctactattatgagaccagctgaggttggttatagtgcaccatattattcttttgaggcgtctacacaagggccatttaaaacacctattgcagcaggacgggggggagcgcaaacagatgaaaatcaagcagcagatggtgatccaagatatgcatttggtagacaacatggtcaaaaaactaccacaacaggagaaacacctgagagatttacatatatagcacatcaagatacaggaagatatccagaaggagattggattcaaaatattaactttaaccttcctgtaacaaatgataatgtattgctaccaacagatccaattggaggtaaagcaggaattaactatactaatatatttaatacttatggtcctttaactgcattaaataatgtaccaccagtttatccaaatggtcaaatttgggataaagaatttgatactgacttaaaaccaagacttcatgtaaatgcaccatttgtttgtcaaaataattgtcctggtcaattatttgtaaaagttgcgcctaatttaacaaatgaatatgatcctgatgcatctgctaatatgtcaagaattgtaacttactcagatttttggtggaaaggtaaattagtatttaaagctaaactaagagcctctcatacttggaatccaattcaacaaatgagtattaatgtagataaccaatttaactatgtaccaagtaatattggaggtatgaaaattgtatatgaaaaatctcaactagcacctagaaaattatactaa

SEQ ID NO: 346 - DNA, 4269 bp, Canine parvovirus 2c UY430
  source 1..4269: mol_type = genomic DNA; note = Canine parvovirus 2c UY430 / Protoparvovirus carnivoran 1 - OK888569
atgtctggcaaccagtatactgaggaagttatggagggagtaaattggttaaagaaacatgcagaaaatgaagcattttcgtttgtttttaaatgtgacaacgtccaactaaatggaaaggatgttcgctggaacaactataccaaaccaattcaaaatgaagagctaacatctttgattagaggagcacaaacagcaatggatcaaaccgaagaagaagaaatggactgggaatcggaagttgatagtctcgccaaaaagcaagtacaaacttttgatgcattaattaaaaaatgtctttttgaagtctttgtttctaaaaatatagaaccaaatgaatgtgtttggtttattcaacatgaatggggaaaagatcaaggctggcattgtcatgttttacttcatagtaagaacttacaacaagcaactggtaaatggctacgcagacaaatgaatatgtattggagtagatggttggtgactctttgttcggtaaacttaacaccaactgaaaagattaagctcagagaaattgcagaagatagtgaatgggtgactatattaacatacagacataagcaaacaaaaaaagactatgttaaaatggttcattttggaaatatgatagcatattactttttaacaaagaaaaaaattgtccacatgacaaaagaaagtggctattttttaagtactgattctggttggaaatttaactttatgaagtatcaagacagacaaattgtcagcacactttacactgaacaaatgaaaccagaaaccgttgaaaccacagtgacgacagcacaggaaacaaagcgcgggagaattcaaactaaaaaggaagtgtcaatcaaatgtactttgcgggacttggttagtaaaagagtaacatcacctgaagactggatgatgttacaaccagatagttatattgaaatgatggcacaaccaggaggtgaaaatcttttaaaaaatacacttgaaatttgtactttgactttagcaagaacaaaaacagcatttgaattaatacttgaaaaagcagataaaactaaactaactaactttgatcttgcaagttctagaacatgtcaaatttttagaatgcacggatggaattggattaaagtttgtcacgctatagcatgtgttttaaatagacaaggtgggaaaagaaatacagttctttttcatggaccagcaagtacaggaaaatctatcattgctcaagccatagcacaagctgtgggtaatgttggttgttataatgcagcaaatgtaaattttccatttaacgactgtaccaataaaaatttaatttggattgaagaagctggtaactttggtcagcaagttaatcaatttaaagcaatctgttctggacaaacaattagaattgatcaaaaaggtaaaggaagtaagcaaattgaaccaactccagtaattatgacaactaatgaaaatataacaattgtgagaattggatgtgaagaaagacctgaacatacacaaccaataagagacagaatgttgaacattaagttagtatgtaagcttccaggagactttggtttggttgataaagaagaatggcctttaatatgtgcatggttagttaaacatggttatgaatcaaccatggctaactatacacatcattggggaaaagtaccagaatgggatgaaaactgggcggagcctaaaatacaagaaggtataaattcaccaggttgcaaagacttagagacgcaagcggcaagcaatcctcagagtcaagaccaagttctaactcctctgactccggacgtagtggaccttgcactggaaccgtggagtactccagatacgcctattgcagaaactgcaaatcaacaatcaaaccaacttggcgttactcacaaagacgtgcaagcgagtccaacgtggtccgaaatagaggcagacctgagagccatctttacttctgaacaactggaagaagattttcgagacgacttggattaaggtacgatggcacctccggcaaagagagccaggagaggtaagggtgtgttagtaaagtggggggaggggaaagatttagtaacttaactaagtatgtgtttttttataggacttgtgcctccaggttataaatatcttggacctgggaacagtcttgaccaaggagaaccaactaacccttcagacgccgctgcaaaagaacacgacgaagcttacgctgcttatcttcgctctggtaaaaacccatacttatatttctcgccagcagatcaacgctttatagatcaaactaaggacgctaaagattggggggggaaaataggacattatttttttagagctaaaaaggcaattgctccagtattaactgatacaccagatcatccatcaacatcaagaccaacaaaaccaactaaaagaagtaaaccaccacctcatattttcatcaatcttgcaaaaaaaaaaaaagccggtgcaggacaagtaaaaagagacaatcttgcaccaatgagtgatggagcagttcaaccagacggtggtcaacctgctgtcagaaatgaaagagcaacaggatctgggaacgggtctggaggcgggggtggtggtggttctgggggtgtggggatttctacgggtactttcaataatcagacggaatttaaatttttggaaaacggatgggtggaaatcacagcaaactcaagcagacttgtacatttaaatatgccagaaagtgaaaattatagaagagtggttgtaaataatttggataaaactgcagttaacggaaacatggctttagatgatactcatgcacaaattgtaacaccttggtcattggttgatgcaaatgcttggggagtttggtttaatccaggagattggcaactaattgttaatactatgagtgagttgcatttagttagttttgaacaagaaatttttaatgttgttttaaagactgtttcagaatctgctactcagccaccaactaaagtttataataatgatttaactgcatcattgatggttgcattagatagtaataatactatgccatttactccagcagctatgagatctgagacattgggtttttatccatggaaaccaaccataccaactccatggagatattattttcaatgggatagaacattaataccatctcatactggaactagtggcacaccaacaaacatataccatggtacagatccagatgatgttcaattttatactattgaaaattctgtgccagtacacttactaagaacaggtgatgaatttgctacaggaacatttttttttgattgtaaaccatgtagactaacacatacatggcaaacaaatagagcattgggcttaccaccatttttaaattctttgcctcaagctgaaggaggtactaactttggttatataggagttcaacaagataaaagacgtggtgtaactcaaatgggaaatacaaactatattactgaagctactattatgagaccagctgaggttggttatagtgcaccatattattcttttgaggcgtctacacaagggccatttaaaacacctattgcagcaggacgggggggagcgcaaacagatgaaaatcaagcagcagatggtgatccaagatatgcatttggtagacaacatggtcaaaaaactaccacaacaggagaaacacctgagagatttacatatatagcacatcaagatacaggaagatatccagaaggagattggattcaaaatattaactttaaccttcctgtaacagaagataatgtattgctaccaacagatccaattggaggtaaaacaggaattaactatactaatatatttaatacttatggtcctttaactgcattaaataatgtaccaccagtttatccaaatggtcaaatttgggataaagaatttgatactgacttaaaaccaagacttcatgtaaatgcaccatttgtttgtcaaaataattgtcctggtcaattatttgtaaaagttgcgcctaatttaacaaatgaatatgatcctgatgcatctgctaatatgtcaagaattgtaacttactcagatttttggtggaaaggtaaattagtatttaaagctaaactaagagcctctcatacttggaatccaattcaacaaatgagtattaatgtagataaccaatttaactatgtaccaagtaatattggaggtatgaaaattgtatatgaaaaatctcaactagcacctagaaaattatattaa

SEQ ID NO: 347 - DNA, 4269 bp, Canine parvovirus 2a  UY443
  source 1..4269: mol_type = genomic DNA; note = Canine parvovirus 2a  UY443 /Protoparvovirus carnivoran 1 - OK888570
atgtctggcaaccagtatactgaggaagttatggagggagtaaattggttaaagaaacatgcagaaaatgaagcattttcgtttgtttttaaatgtgacaacgttcaactaaatggaaaggatgttcgctggaacaactataccaaaccaattcaaaatgaagagctaacatctttaattagaggagcacaaacagcaatggatcaaaccgaagaagaagaaatggactgggaatcggaagttgatagtctcgccaaaaagcaagtacaaacttttgatgcattaattaaaaaatgtctttttgaagtctttgtttctaaaaatatagaaccaaatgaatgtgtttggtttattcaacatgaatggggaaaagatcaaggctggcattgtcatgttttacttcatagtaagaacttacaacaagcaactggtaaatggctacgcagacaaatgaatatgtattggagtagatggttggtgactctttgttcggtaaacttaacaccaactgaaaagattaagctcagagaaattgcagaagatagtgaatgggtgactatattaacatacagacataagcaaacaaaaaaagactatgttaaaatggttcattttggaaatatgatagcatattactttttaacaaagaaaaaaattgtccacatgacaaaagaaagtggctattttttaagtactgattctggttggaaatttaactttatgaagtatcaagacagacaaattgtcagcacactttacactgaacaaatgaaaccagaaaccgttgaaaccacagtgacgacagcacaggaaacaaagcgcgggagaattcaaactaaaaaggaagtgtcaatcaaatgtactttgcgggacttggttagtaaaagagtaacatcacctgaagactggatgatgttacaaccagatagttatattgaaatgatggcacaaccaggaggtgaaaatcttttaaaaaatacacttgaaatttgtactttgactttagcaagaacaaaaacagcatttgaattaatacttgaaaaagcagataaaactaaactgactaactttgatcttgcaaattctagaacatgtcagatttttagaatgcacggatggaattggattaaagtttgtcacgctatagcatgtgttttaaatagacaaggtggtaaaagaaatacagttctttttcatggaccagcaagtacaggaaaatctatcattgctcaagccatagcacaagctgtgggtaatgttggttgttataatgcagcaaatgtaaattttccatttaatgactgtaccaataaaaatttaatttggattgaagaagctggtaactttggtcaacaagttaatcaatttaaagcaatttgttctggacaaacaattagaattgatcaaaaaggtaaaggaagtaagcaaattgaaccaactccagtaattatgacaactaatgaaaatataacaattgtgagaattggatgtgaagaaagacctgaacatacacaaccaataagagacagaatgttgaacattaagttagtatgtaagcttccaggagactttggtttggttgataaagaagaatggcctttaatatgtgcatggttagttaaacatggttatgaatcaaccatggctaactatacacatcattggggaaaagtaccagaatgggatgaaaactgggcggagcctaaaatacaagaaggtataaattcaccaggttgcaaagacttagagacgcaagcggcaagcaatcctcagagtcaagaccaagttctaactcctctgactccggacgtagtggaccttgcactggaaccgtggagtactccagatacgcctattgcagaaactgcaaatcagcaatcaaaccaacttggcgttactcacaaagacgtgcaagcgagtccaacgtggtccgaaatagaggcagacctgagagccatctttacttctgaacaactggaagaagattttcgagacgacttggattaaggtacgatggcacctccggcaaagagagccaggagaggtaagggtgtgttagtaaagtggggggaggggaaagatttagtaacttaactaagtatgtgtttttttataggacttgtgcctccaggttataaatatcttgggcctgggaacagtcttgaccaaggagaaccaactaacccttctgacgccgctgcaaaagaacacgacgaagcttacgctgcttatcttcgctctggtaaaaacccatacttatatttctcgccagcagatcaacgctttatagatcaaactaaggacgctaaagattggggggggaaaataggacattatttttttagagctaaaaaggcaattgctccagtattaactgatacaccagatcatccatcaacatcaagaccaacaaaaccaactaaaagaagtaaaccaccacctcatattttcatcaatcttgcaaaaaaaaaaaaagccggtgcaggacaagtaaaaagagacaatcttgcaccaatgagtgatggagcagttcaaccagacggtggtcagcctgctgtcagaaatgaaagagctacaggatctgggaacgggtctggaggcgggggtggtggtggttctgggggtgtggggatttctacgggtactttcaataatcagacggaatttaaatttttggaaaacggatgggtggaaatcacagcaaactcaagcagacttgtacatttaaatatgccagaaagtgaaaattatagaagagtggttgtaaataatttggataaaactgcagttaacggaaacatggctttagatgatacccatgcacaaattgtaacaccttggtcattggttgatgcaaatgcttggggagtttggtttaatccaggagattggcaactaattgttaatactatgagtgagttgcatttagttagttttgaacaagaaatttttaatgttgttttaaagactgtttcagaatctgctactcagccaccaactaaagtttataataatgatttaactgcatcattgatggttgcattagatagtaataatactatgccatttactccagcagctatgagatctgagacattgggtttttatccatggaaaccaaccataccaactccatggagatattattttcaatgggatagaacattaataccatctcatactggaactagtggcacaccaacaaatatataccatggtacagatccagatgatgttcaattttacactattgaaaattctgtgccagtacacttactaagaacaggtgatgaatttgctacaggaacattttattttgattgtaaaccatgtagactaacacacacatggcaaacaaatagagcattgggcttaccaccatttctaaattctttgcctcaagctgaaggaggtactaactttggttatataggagttcaacaagataaaagacgtggtgtaactcaaatgggaaatacaaacattattactgaagctactattatgagaccagctgaggttggttatagtgcaccatattattcttttgaggcgtctacacaagggccatttaaaacacctattgcagcaggacgggggggagcgcaaacagatgaaaatcaagcagcagatggtgatccaagatatgcatttggtagacaacatggtcaaaaaactaccacaacaggagaaacacctgagagatttacatatatagcacatcaagatacaggaagatatccagaaggagattggattcaaaatattaactttaaccttcctgtaacaaatgataatgtattgctaccaacagatccaattggaggtaaagcaggaattaactatactaatatatttaatacttatggtcctttaactgcattaaataatgtaccaccagtttatccaaatggtcaaatttgggataaagaatttgatactgacttaaaaccaagacttcatgtaaatgcaccatttgtttgtcaaaataattgtcctggtcaattatttgtaaaagttgcgcctaatttaacaaatgaatatgatcctgatgcatctgctaatatgtcaagaattgtaacttactcagatttttggtggaaaggtaaattagtatttaaagctaaactaagagcctctcatacttggaatccaattcaacaaatgagtattaatgtagataaccaatttaactatgtaccaagtaatattggaggtatgaaaattgtatatgaaaaatctcaactagcacctagaaaattatactaa

SEQ ID NO: 348 - DNA, 4269 bp, Canine parvovirus 2a UY445
  source 1..4269: mol_type = genomic DNA; note = Canine parvovirus 2a UY445 / Protoparvovirus carnivoran 1 - OK888571
atgtctggcaaccagtatactgaggaagttatggagggagtaaattggttaaagaaacatgcagaaaatgaagcattttcatttgtttttaaatgtgacaacgtccaactaaatggaaaggatgttcgctggaacaactataccaaaccaattcaaaatgaagagctaacatctttaattagaggagcacaaacagcaatggatcaaaccgaagaagaagaaatggactgggaatcggaagttgatagtctcgccaaaaagcaagtacaaacttttgatgcattaattaaaaaatgtctttttgaagtctttgtttctaaaaatatagaaccaaatgaatgcgtttggtttattcaacatgaatggggaaaagatcaaggctggcattgtcatgttttacttcatagtaagaacttacaacaagcaactggtaaatggctacgcagacaaatgaatatgtattggagtagatggttggtgactctttgttcggtaaacttaacaccaactgaaaaaattaagctcagagaaattgcagaagatagtgaatgggtgactatattaacatacagacataagcaaacaaaaaaagactatgttaaaatggttcattttggaaatatgatagcatattactttttaacaaagaaaaaaattgtccacatgacaaaagaaagtggctattttttaagtactgattctggttggaaatttaactttatgaagtatcaagacagacaaattgtcagcacactttacactgaacaaatgagaccagaaaccgttgaaaccacagtgacgacagcacaggaaacaaagcgcgggagaattcaaactaaaaaggaagtgtcaatcaaatgtactttgcgggacttggttagtaaaagagtaacatcacctgaagactggatgatgttacaaccagatagttatattgaaatgatggcacaaccaggaggtgaaaatcttttaaaaaatacacttgaaatttgtactttgactttagcaagaacaaaaacagcatttgaattaatacttgaaaaagcagataatactaaactaactaactttgatcttgcaaattctagaacatgtcaaatttttagaatgcacggatggaattggattaaagtttgtcacgctatagcatgtgttttaaatagacaaggtggcaaaagaaatacagttctttttcatggaccagcaagtacaggaaaatctatcattgctcaagccatagcacaagctgtgggtaatgttggttgttataatgcagcaaatgtaaattttccatttaatgactgtaccaataaaaatttaatttggattgaagaagctggtaactttggtcaacaagttaatcaatttaaagcaatctgttctggacaaacaattagaattgatcaaaaaggtaaaggaagtaagcaaattgaaccaactccagtaattatgacaactaatgaaaatataacaattgtgagaattggatgtgaagaaagacctgaacatacacaaccaataagagacagaatgttgaacatcaagttagtatgtaagcttccaggagactttggtttggttgataaagaagaatggcctttaatatgtgcatggttagttaaacatggttatgaatcaaccatggctaactatacacatcattggggaaaagtaccagaatgggatgaaaactgggcggagcctaaaatacaaaaaggtataaattcaccaggttgcaaagacttagagacgcaagcggcaagcaatcctcagagtcaagaccaagttctaactcctctgactccggacgtagtggaccttgcactggaaccgtggagtactccagatacgcctattgcagaaactgcaaatcaacaatcaaaccaacttggcgttactcacaaagacgtgcaagcgagtccaacgtggtccgaaatagaggcagacctgagagccatctttacttctgaacaattggaagaagattttcgagacgacttggattaaggtacgatggcacctccggcaaagagagccaggagaggtaagggtgtgttaataaggtggggggaggggaaagatttgataacttaactaagtatgtgtttttttataggacttgtgcctccaggttataaatatcttgggcctgggaacagtcttgaccaaggagaaccaactaacccttctgacgccgctgcaaaagaacacgacgaagcttacgctgcttatcttcgctctggtaaaaacccatacttatatttctcgccagcagatcaacgctttatagatcaaactaaggacgctaaagattggggggggaaaataggacattatttttttagagctaaaaaggcaattgctccagtattaactgatacaccagatcatccatcaacatcaagaccaacaaaaccaactaaaagaagtagaccaccacctcatattttcatcaatcttgcaaaaaaaaaaaaagccggtgcaggacaagtaaaaagagacaatcttgcaccaatgagtgatggagcagttcaaccagacggtggtcagcctgctgtcagaaatgaaagagctacaggatctgggaacgggtctggaggcgggggtggtggtggttctgggggtgtggggatttctacgggtactttcaataatcagacggaatttaaatttttggaaaacggatgggtggaaatcacagcaaactcaagcagacttgtacatttaaatatgccagaaagtgaaaattatagaagagtggttgtaaataatttggataaaactgcagttaacggaaacatggctttagatgatacccatgcacaaattgtaacaccttggtcattggttgatgcaaatgcttggggagtttggtttaatccaggagattggcaactaattgttaatactatgagtgagttgcatttagttagttttgaacaagaaatttttaatgttgttttaaagactgtttcagaatctgctactcagccaccaactaaagtttataataatgatttaactgcatcattgatggttgcattagatagtaataatactatgccatttactccagcagctatgagatctgagacattgggtttttatccatggaaaccaaccataccaactccatggagatattattttcaatgggatagaacattaataccatctcatactggaactagtggcacaccaacaaatatataccatggtacagatccagatgatgttcaattttacactattgaaaattctgtgccagtacacttactaagaacaggtgatgaatttgctacaggaacattttattttgattgtaaaccatgtagactaacacacacatggcaaacaaatagagcattgggcttaccaccatttctaaattctttgcctcaagctgaaggaggtactaactttggttatataggagttcaacaagataaaagacgtggtgtaactcaaatgggaaatacaaacattattactgaagctactattatgagaccagctgaggttggttatagtgcaccatattattcttttgaggcgtctacacaagggccatttaaaacacctattgcagcaggacgggggggagcgcaaacagatgaaaatcaagcagcagatggtgatccaagatatgcatttggtagacaacatggtcaaaaaactaccacaacaggagaaacacctgagagatttacatatatagcacatcaagatacaggaagatatccagaaggagattggattcaaaatattaacttcaaccttcctgtaacaaatgataatgtattgctaccaacagatccaattggaggtaaagcaggaattaactatactaatatatttaatacttatggtcctttaactgcattaaataatgtaccaccagtttatccaaatggtcaaatttgggataaagaatttgatactgacttaaaaccaagacttcatgtaaatgcaccatttgtttgtcaaaataattgtcctggtcaattatttgtaaaagttgcgcctaatttaacaaatgaatatgatcctgatgcatctgctaatatgtcaagaattgtaacttactcagatttttggtggaaaggtaaattagtatttaaagctaaactaagagcctctcatacttggaatccaattcaacaaatgagtattaatgtagataaccaatttaactatgtaccaagtaatattggaggtatgaaaattgtatatgaaaaatctcaactagcacctagaaaattatactaa

SEQ ID NO: 349 - DNA, 4269 bp, Canine parvovirus 2a UY443
  source 1..4269: mol_type = genomic DNA; note = Canine parvovirus 2a UY443 / Protoparvovirus carnivoran 1 - OK888572
atgtctggcaaccagtatactgaggaagttatggagggagtaaattggttaaagaaacatgcagaaaatgaagcattttcatttgtttttaaatgtgacaacgtccaactaaatggaaaggatgttcgctggaacaactataccaaaccaattcaaaatgaagagctaacatctttaattagaggagcacaaacagcaatggatcaaaccgaagaagaagaaatggactgggaatcggaagttgatagtctcgccaaaaagcaagtacaaacttttgatgcattaattaaaaaatgtctttttgaagtctttgtttctaaaaatatagaaccaaatgaatgcgtttggtttattcaacatgaatggggaaaagatcaaggctggcattgtcatgttttacttcatagtaagaacttacaacaagcaactggtaaatggctacgcagacaaatgaatatgtattggagtagatggttggtgactctttgttcggtaaacttaacaccaactgaaaaaattaagctcagagaaattgcagaagatagtgaatgggtgactatattaacatacagacataagcaaacaaaaaaagactatgttaaaatggttcattttggaaatatgatagcatattactttttaacaaagaaaaaaattgtccacatgacaaaagaaagtggctattttttaagtactgattctggttggaaatttaactttatgaagtatcaagacagacaaattgtcagcacactttacactgaacaaatgaaaccagaaaccgttgaaaccacagtgacgacagcacaggaaacaaagcgcgggagaattcaaactaaaaaggaagtgtcaatcaaatgtactttgcgggacttggttagtaaaagagtaacatcacctgaagactggatgatgttacaaccagatagttatattgaaatgatggcacaaccaggaggtgaaaatcttttaaaaaatacacttgaaatttgtactttgactttagcaagaacaaaaacagcatttgaattaatacttgaaaaagcagataatactaaactaactaactttgatcttgcaaattctagaacatgtcaaatttttagaatgcacggatggaattggattaaagtttgtcacgctatagcatgtgttttaaatagacaaggtggcaaaagaaatacagttctttttcatggaccagcaagtacaggaaaatctatcattgctcaagccatagcacaagctgtgggtaatgttggttgttataatgcagcaaatgtaaattttccatttaatgactgtaccaataaaaatttaatttggattgaagaagctggtaactttggtcaacaagttaatcaatttaaagcaatctgttctggacaaacaattagaattgatcaaaaaggtaaaggaagtaagcaaattgaaccaactccagtaattatgacaactaatgaaaatataacaattgtgagaattggatgtgaagaaagacctgaacatacacaaccaataagagacagaatgttgaacatcaagttagtatgtaagcttccaggagactttggtttggttgataaagaagaatggcctttaatatgtgcatggttagttaaacatggttatgaatcaaccatggctaactatacacatcattggggaaaagtaccagaatgggatgaaaactgggcggagcctaaaatacaaaaaggtataaattcaccaggttgcaaagacttagagacgcaagcggcaagcaatcctcagagtcaagaccaagttctaactcctctgactccggacgtagtggaccttgcactggaaccgtggagtactccagatacgcctattgcagaaactgcaaatcaacaatcaaaccaacttggcgttactcacaaagacgtgcaagcgagtccaacgtggtccgaaatagaggcagacctgagagccatctttacttctgaacaattggaagaagattttcgagacgacttggattaaggtacgatggcacctccggcaaagagagccaggagaggtaagggtgtgttaataaggtggggggaggggaaagatttgataacttaactaagtatgtgtttttttataggacttgtgcctccaggttataaatatcttgggcctgggaacagtcttgaccaaggagaaccaactaacccttctgacgccgctgcaaaagaacacgacgaagcttacgctgcttatcttcgctctggtaaaaacccatacttatatttctcgccagcagatcaacgctttatagatcaaactaaggacgctaaagattggggggggaaaataggacattatttttttagagctaaaaaggcaattgctccagtattaactgatacaccagatcatccatcaacatcaagaccaacaaaaccaactaaaagaagtagaccaccacctcatattttcatcaatcttgcaaaaaaaaaaaaagccggtgcaggacaagtaaaaagagacaatcttgcaccaatgagtgatggagcagttcaaccagacggtggtcagcctgctgtcagaaatgaaagagctacaggatctgggaacgggtctggaggcgggggtggtggtggttctgggggtgtggggatttctacgggtactttcaataatcagacggaatttaaatttttggaaaacggatgggtggaaatctcagcaaactcaagcagacttgtacatttaaatatgccagaaagtgaaaattatagaagagtggttgtaaataatttggataaaactgcagttaacggaaacatggctttagatgatacccatgcacaaattgtaacaccttggtcattggttgatgcaaatgcttggggagtttggtttaatccaggagattggcaactaattgttaatactatgagtgagttgcatttagttagttttgaacaagaaatttttaatgttgttttaaagactgtttcagaatctgctactcagccaccaactaaagtttataataatgatttaactgcatcattgatggttgcattagatagtaataatactatgccatttactccagcagctatgagatctgagacattgggtttttatccatggaaaccaaccataccaactccatggagatattattttcaatgggatagaacattaataccatctcatactggaactagtggcacaccaacaaatatataccatggtacagatccagatgatgttcaattttacactattgaaaattctgtgccagtacacttactaagaacaggtgatgaatttgctacaggaacattttattttgattgtaaaccatgtagactaacacacacatggcaaacaaatagagcattgggcttaccaccatttctaaattctttgcctcaagctgaaggaggtactaactttggttatataggagttcaacaagataaaagacgtggtgtaactcaaatgggaaatacaaacattattactgaagctactattatgagaccagctgaggttggttatagtgcaccatattattcttttgaggcgtctacacaagggccatttaaaacacctattgcagcaggacgggggggagcgcaaacagatgaaaatcaagcagcagatggtgatccaagatatgcatttggtagacaacatggtcaaaaaactaccacaacaggagaaacacctgagagatttacatatatagcacatcaagatacaggaagatatccagaaggagattggattcaaaatattaactttaaccttcctgtaacaaatgataatgtattgctaccaacagatccaattggaggtaaagcaggaattaactatactaatatatttaatacttatggtcctttaactgcattaaataatgtaccaccagtttatccaaatggtcaaatttgggataaagaatttgatactgacttaaaaccaagacttcatgtaaatgcaccatttgtttgtcaaaataattgtcctggtcaattatttgtaaaagttgcgcctaatttaacaaatgaatatgatcctgatgcatctgctaatatgtcaagaattgtaacttactcagatttttggtggaaaggtaaattagtatttaaagctaaactaagagcctctcatacttggaatccaattcaacaaatgagtattaatgtagataaccaatttaactatgtaccaagtaatattggaggtatgaaaattgtatatgaaaaatctcaactagcacctagaaaattatactaa

SEQ ID NO: 350 - DNA, 4269 bp, Canine parvovirus 2a UY459; identical to SEQ ID NO: 339
  source 1..4269: mol_type = genomic DNA; note = Canine parvovirus 2a UY459 / Protoparvovirus carnivoran 1 - OK888573

SEQ ID NO: 351 - DNA, 4269 bp, Canine parvovirus 2a UY463
  source 1..4269: mol_type = genomic DNA; note = Canine parvovirus 2a UY463 / Protoparvovirus carnivoran 1 - OK888574
atgtctggcaaccagtatactgaggaagttatggagggagtaaattggttaaagaaacatgcagaaaatgaagcattttcatttgtttttaaatgtgacaacgtccaactaaatggaaaggatgttcgctggaacaactataccaaaccaattcaaaatgaagagctaacatctttaattagaggagcacaaacagcaatggatcaaaccgaagaagaagaaatggactgggaatcggaagttgatagtctcgccaaaaagcaagtacaaacttttgatgcattaattaaaaaatgtctttttgaagtctttgtttctaaaaatatagaaccaaatgaatgcgtttggtttattcaacatgaatggggaaaagatcaaggctggcattgtcatgttttacttcatagtaagaacttacaacaagcaactggtaaatggctacgcagacaaatgaatatgtattggagtagatggttggtgactctttgttcggtaaacttaacaccaactgaaaaaattaagctcagagaaattgcagaagatagtgaatgggtgactatattaacatacagacataagcaaacaaaaaaagactatgttaaaatggttcattttggaaatatgatagcatattactttttaacaaagaaaaaaattgtccacatgacaaaagaaagtggctattttttaagtactgattctggttggaaatttaattttatgaagtatcaagacagacaaattgtcagcacactttacactgaacaaatgaaaccagaaaccgttgaaaccacagtgacgacagcacaggaaacaaagcgcgggagaattcaaactaaaaaggaagtgtcaatcaaatgtactttgcgggacttggttagtaaaagagtaacatcacctgaagactggatgatgttacaaccagatagttatattgaaatgatggcacaaccaggaggtgaaaatcttttaaaaaatacacttgaaatttgtactttaactttagcaagaacaaaaacagcatttgaattaatacttgaaaaagcagataatactaaactaactaactttgatcttgcaaattctagaacatgtcaaatttttagaatgcacggatggaattggattaaagtttgtcacgctatagcatgtgttttaaatagacaaggtggcaaaagaaatacagttctttttcatggaccagcaagtacaggaaaatctatcattgctcaagccatagcacaagctgtgggtaatgttggttgttataatgcagcaaatgtaaattttccatttaatgactgtaccaataaaaatttaatttggattgaagaagctggtaactttggtcaacaagttaatcaatttaaagcaatctgttctggacaaacaattagaattgatcaaaaaggtaaaggaagtaagcaaattgaaccaactccagtaattatgacaactaatgaaaatataacaattgtgagaattggatgtgaagaaagacctgaacatacacaaccaataagagacagaatgttgaacatcaagttagtatgtaagcttccaggagactttggtttggttgataaagaagaatggcctttaatatgtgcatggttagttaaacatggttatgaatcaaccatggctaactatacacatcattggggaaaagtaccagaatgggatgaaaactgggcggagcctaaaatacaaaaaggtataaattcaccaggttgcaaagacttagagacgcaagcggcaagcaatcctcagagtcaagaccaagttctaactcctctgactccggacgtagtggaccttgcactggaaccgtggagtactccagatacgcctattgcagaaactgcaaatcaacaatcaaaccaacttggcgttactcacaaagacgtgcaagcgagtccaacgtggtccgaaatagaggcagacctgagagccatctttacttctgaacaattggaagaagattttcgagacgacttggattaaggtacgatggcacctccggcaaagagagccaggagaggtaagggtgtgttaataaggtggggggaggggaaagatttgataacttaactaagtatgtgtttttttataggacttgtgcctccaggttataaatatcttgggcctgggaacagtcttgaccaaggagaaccaactaacccttctgacgccgctgcaaaagaacacgacgaagcttacgctgcttatcttcgctctggtaaaaacccatacttatatttctcgccagcagatcaacgctttatagatcaaactaaggacgctaaagattggggggggaaaataggacattatttttttagagctaaaaaggcaattgctccagtattaactgatacaccagatcatccatcaacatcaagaccaacaaaaccaactaaaagaagtagaccaccacctcatattttcatcaatcttgcaaaaaaaaaaaaagccggtgcaggacaagtaaaaagagacaatcttgcaccaatgagtgatggagcagttcaaccagacggtggtcagcctgctgtcagaaatgaaagagctacaggatctgggaacgggtctggaggcgggggtggtggtggttctgggggtgtggggatttctacgggtactttcaataatcagacggaatttaaatttttggaaaacggatgggtggaaatcacagcaaactcaagcagacttgtacatttaaatatgccagaaagtgaaaattatagaagagtggttgtaaataatttggataaaactgcagttaacggaaacatggctttagatgatacccatgcacaaattgtaacaccttggtcattggttgatgcaaatgcttggggagtttggtttaatccaggagattggcaactaattgttaatactatgagtgagttgcatttagttagttttgaacaagaaatttttaatgttgttttaaagactgtttcagaatctgctactcagccaccaactaaagtttataataatgatttaactgcatcattgatggttgcattagatagtaataatactatgccatttactccagcagctatgagatctgagacattgggtttttatccatggaaaccaaccataccaactccatggagatattattttcaatgggatagaacattaataccatctcatactggaactagtggcacaccaacaaatatataccatggtacagatccagatgatgttcaattttacactattgaaaattctgtgccagtacacttactaagaacaggtgatgaatttgctacaggaacattttattttgattgtaaaccatgtagactaacacacacatggcaaacaaatagagcattgggcttaccaccatttctaaattctttgcctcaagctgaaggaggtactaactttggttatataggagttcaacaagataaaagacgtggtgtaactcaaatgggaaatacaaacattattactgaagctactattatgagaccagctgaggttggttatagtgcaccatattattcttttgaggcgtctacacaagggccatttaaaacacctattgcagcaggacgggggggagcgcaaacagatgaaaatcaagcagcagatggtgatccaagatatgcatttggtagacaacatggtcaaaaaactaccacaacaggagaaacacctgagagatttacatatatagcacatcaagatacaggaagatatccagaaggagattggattcaaaatattaactttaaccttcctgtaacaaatgataatgtattgctaccaacagatccaattggaggtaaagcaggaattaactatactaatatatttaatacttatggtcctttaactgcattaaataatgtaccaccagtttatccaaatggtcaaatttgggataaagaatttgatactgacttaaaaccaagacttcatgtaaatgcaccatttgtttgtcaaaataattgtcctggtcaattatttgtaaaagttgcgcctaatttaacaaatgaatatgatcctgatgcatctgctaatatgtcaagaattgtaacttactcagatttttggtggaaaggtaaattagtatttaaagctaaactaagagcctctcatacttggaatccaattcaacaaatgagtattaatgtagataaccaatttaactatgtaccaagtaatattggaggtatgaaaattgtatatgaaaaatctcaactagcacctagaaaattatactaa

SEQ ID NO: 352 - DNA, 4269 bp, Canine parvovirus 2c UY467
  source 1..4269: mol_type = genomic DNA; note = Canine parvovirus 2c UY467 / Protoparvovirus carnivoran 1 - OK888575
atgtctggcaaccagtatactgaggaagttatggagggagtaaattggttaaagaaacatgcagaaaatgaagcattttcgtttgtttttaaatgtgacaacgtccaactaaatggaaaggatgttcgctggaacaactataccaaaccaattcaaaatgaagagctaacatctttaattagaggagcacaaacagcaatggatcaaaccgaagaagaagaaatggactgggaatcggaagttgatagtctcgccaaaaagcaagtacaaacttttgatgcattaattaaaaaatgtctttttgaagtctttgtttctaaaaatatagaaccaaatgaatgtgtttggtttattcaacatgaatggggaaaagatcaaggctggcattgtcatgttttacttcatagtaagaacttacaacaagcaactggtaaatggctacgcagacaaatgaatatgtattggagtagatggttggtgactctttgttcggtaaacttaacaccaactgaaaagattaagctcagagaaattgcagaagatagtgaatgggtgactatattaacatacagacataagcaaacaaaaaaagactatgttaaaatggttcattttggaaatatgatagcatattactttttaacaaagaaaaaaattgtccacatgacaaaagaaagtggctattttttaagtactgattctggttggaaatttaactttatgaagtatcaagacagacaaattgtcagcacactttacactgaacaaatgaaaccagaaaccgttgaaaccacagtgacgacagcacaggaaacaaagcgcgggagaattcaaactaaaaaggaagtgtcaatcaaatgtactttgcgggacttggttagtaaaagagtaacatcacctgaagactggatgatgttacaaccagatagttatattgaaatgatggcacaaccaggaggtgaaaatcttttgaaaaatacacttgaaatttgtactttgactttagcaagaacaaaaacagcatttgaattaatacttgaaaaagcagataatactaaactgactaactttgatcttgcaaattctagaacatgtcagatttttagaatgcacggatggaattggattaaagtttgtcacgctatagcatgtgttttaaatagacaaggtggtaaaagaaatacagttctttttcatggaccagcaagtacaggaaaatctatcattgctcaagccatagcacaagctgtgggtaatgttggttgttataatgcagcaaatgtaaattttccatttaatgactgtaccaataaaaatttaatttggattgaagaagctggtaactttggtcaacaagttaatcaatttaaagcaatttgttctggacaaacaattagaattgatcaaaaaggtaaaggaagtaagcaaattgaaccaactccagtaattatgacaactaatgaaaatataacaattgtgagaattggatgtgaagaaagacctgaacatacacaaccaataagagacagaatgttgaacattaagttagtatgtaagcttccaggagactttggtttggttgataaagaagaatggcctttaatatgtgcatggttagttaaacatggttatgaatcaaccatggctaactatacacatcattggggaaaagtaccagaatgggatgaaaactgggcggagcctaaaatacaagaaggtataaattcaccaggttgcaaagacttagagacgcaagcggcaagcaatcctcagagtcaagaccaagttctaactcctctgactccggacgtagtggaccttgcactggaaccgtggagtactccagatacgcctattgcagaaactgcaaatcagcaatcaaaccaacttggcgttactcacaaagacgtgcaagcgagtccaacgtggtccgaaatagaggcagacctgagagccatctttacttctgaacaactggaagaagattttcgagacgacttggattaaggtacgatggcacctccggcaaagagagccaggagaggtaagggtgtgttagtaaagtggggggaggggaaagatttagtaacttaactaagtatgtgtttttttatagggcttgtgcctccaggttacaaatatcttgggcctgggaacagtcttgaccaaggagaaccaactaacccttctgacgccgctgcaaaagaacacgacgaagcttacgctgcttatcttcgctctggtaaaaacccatacttatatttctcgccagcagatcaacgctttatagatcaaactaaggacgctaaagattggggggggaaaataggacattatttttttagagctaaaaaggcaattgctccagtattaactgatacaccagatcatccatcaacatcaagaccaacaaaaccaactaaaagaagtaaaccaccacctcatattttcatcaatcttgcaaaaaaaaaaaaagccggtgcaggacaagtaaaaagagacaatcttgcaccaatgagtgatggagcagttcaaccagacggtggtcaatctgctgtcagaaatgaaagagcaacaggatctgggaacgggtctggaggcgggggtggtggtggttctgggggtgtggggatttctacgggtactttcaataatcagacggaatttaaatttttggaaaacggatgggtggaaatcacagcaaactcaagcagacttgtacatttaaatatgccagaaagtgaaaattatagaagagtggttgtaaataatttggataaaactgcagttaacggaaacatggctttagatgatactcatgcacaaattgtaacaccttggtcattggttgatgcaaatgcttggggagtttggtttaatccaggagattggcaactaattgttaatactatgagtgagttgcatttagttagttttgaacaagaaatttttaatgttgttttaaagactgtttcagaatctgctactcagccaccaactaaagtttataataatgatttaactgcatcattgatggttgcattagatagtaataatactatgccatttactccagcagctatgagatctgagacattgggtttttatccatggaaaccaaccataccaactccatggagatattattttcaatgggatagaacattaataccatctcatactggaactagtggcacaccaacaaatatataccatggtacagatccagatgatgttcaattttatactattgaaaattctgtgccagtacacttactaagaacaggtgatgaatttgctacaggaacatttttttttgattgtaaaccatgtagactaacacatacatggcaaacaaatagagcattgggcttaccaccatttctaaattctttacctcaagctgaaggaggtactaactttggttatataggagttcaacaagataaaagacgtggtgtaactcaaatgggaaatacaaactatattactgaagctactattatgagaccagctgaggttggttatagtgcaccatattattcttttgaggcgtctacacaagggccatttaaaacacctattgcagcaggacgggggggagcgcaaacagatgaaaatcaagcagcagatggtgatccaagatatgcatttggtagacaacatggtcaaaaaactaccacaacaggagaaacacctgagagatttacatatatagcacatcaagatacaggaagatatccagaaggagattggattcaaaatattaactttaaccttcctgtaacagaagataatgtattactaccaacagatccaattggaggtaaaacaggaattaactatactaatatatttaatacttatggtcctttaactgcattaaataatgtaccaccagtttatccaaatggtcaaatttgggataaagaatttgatactgacttaaaaccaagacttcatgtaaatgcaccatttgtttgtcaaaataattgtcctggtcaattatttgtaaaagttgcgcctaatttaacaaatgaatatgatcctgatgcatctgctaatatgtcaagaattgtaacttactcagatttttggtggaaaggtaaattagtatttaaagctaaactaagagcctctcatacttggaatccaattcaacaaatgagtattaatgtagataaccaatttaactatgtaccaagtaatattggaggtatgaaaattgtatatgaaaaatctcaactagcacctagaaaattatattaa

SEQ ID NO: 353 - DNA, 4269 bp, Canine parvovirus 2a UY470; identical to SEQ ID NO: 339
  source 1..4269: mol_type = genomic DNA; note = Canine parvovirus 2a UY470 / Protoparvovirus carnivoran 1 - OK888576

SEQ ID NO: 354 - DNA, 4269 bp, Canine parvovirus 2a UY476A; identical to SEQ ID NO: 339
  source 1..4269: mol_type = genomic DNA; note = Canine parvovirus 2a UY476A / Protoparvovirus carnivoran 1 - OK888577

SEQ ID NO: 355 - DNA, 4269 bp, Canine parvovirus 2a UY486
  source 1..4269: mol_type = genomic DNA; note = Canine parvovirus 2a UY486 / Protoparvovirus carnivoran 1 - OK888578
atgtctggcaaccagtatactgaggaagttatggagggagtaaattggttaaagaaacatgcagaaaatgaagcattttcatttgtttttaaatgtgacaacgtccaactaaatggaaaggatgttcgctggaacaactataccaaaccaattcaaaatgaagagctaacatctttaattagaggagcacaaacagcaatggatcaaaccgaagaagaagaaatggactgggaatcggaagttgatagtctcgccaaaaagcaagtacaaacttttgatgcattaattaaaaaatgtctttttgaagtctttgtttctaaaaatatagaaccaaatgaatgcgtttggtttattcaacatgaatggggaaaagatcaaggctggcattgtcatgttttacttcatagtaagaacttacaacaagcaactggtaaatggctacgcagacaaatgaatatgtattggagtagatggttggtgactctttgttcggtaaacttaacaccaactgaaaaaattaagctcagagaaattgcagaagatagtgaatgggtgactatattaacatacagacataagcaaacaaaaaaagactatgttaaaatggttcattttggaaatatgatagcatattactttttaacaaagaaaaaaattgtccacatgacaaaagaaagtggctattttttaagtactgattctggttggaaatttaactttatgaagtatcaagacagacaaattgtcagcacactttacactgaacaaatgaaaccagaaaccgttgaaaccacagtgacgacagcacaggaaacaaagcgcgggagaattcaaactaaaaaggaagtgtcaatcaaatgtactttgcgggacttggttagtaaaagagtaacatcacctgaagactggatgatgttacaaccagatagttatattgaaatgatggcacaaccaggaggtgaaaatcttttaaaaaatacacttgaaatttgtactttgactttagcaagaacaaaaacagcatttgaattaatacttgaaaaagcagataatactaaactaactaactttgatcttgcaaattctagaacatgtcaaatttttagaatgcacggatggaattggattaaagtttgtcacgctatagcatgtgttttaaatagacaaggtggcaaaagaaatacagttctttttcatggaccagcaagtacaggaaaatctatcattgctcaagccatagcacaagctgtgggtaatgttggttgttataatgcagcaaatgtaaatttcccatttaatgactgtaccaataaaaatttaatttggattgaagaagctggtaactttggtcaacaagttaatcaatttaaagcaatttgttctggacaaacaattagaattgatcaaaaaggtaaaggaagtaagcaaattgaaccaactccagtaattatgacaactaatgaaaatataacaattgtgagaattggatgtgaagaaagacctgaacatacacaaccaataagagacagaatgttgaacatcaagttagtatgtaagcttccaggagactttggtttggttgataaagaagaatggcctttaatatgtgcatggttagttaaacatggttatgaatcaaccatggctaactatacacatcattggggaaaagtaccagaatgggatgaaaactgggcggagcctaaaatacaaaaaggtataaattcaccaggttgcaaagacttagagacgcaagcggcaagcaatcctcagagtcaagaccaagttctaactcctctgactccggacgtagtggaccttgcactggaaccgtggagtactccagatacgcctattgcagaaactgcaaatcaacaatcaaaccaacttggcgttactcacaaagacgtgcaagcgagtccaacgtggtccgaaatagaggcagacctgagagccatctttacttctgaacaattggaagaagattttcgagacgacttggattaaggtacgatggcacctccggcaaagagagccaggagaggtaagggtgtgttaataaggtggggggaggggaaagatttgataacttaactaagtatgtgtttttttataggacttgtgcctccaggttataaatatcttgggcctgggaacagtcttgaccaaggagaaccaactaacccttctgacgccgctgcaaaagaacacgacgaagcttacgctgcttatcttcgctctggtaaaaacccatacttatatttctcgccagcagatcaacgctttatagatcaaactaaggacgctaaagattggggggggaaaataggacattatttttttagagctaaaaaggcaattgctccagtattaactgatacaccagatcatccatcaacatcaagaccaacaaaaccaactaaaagaagtagaccaccacctcatattttcatcaatcttgcaaaaaaaaaaaaagccggtgcaggacaagtaaaaagagacaatcttgcaccaatgagtgatggagcagttcaaccagacggtggtcagcctgctgtcagaaatgaaagagctacaggatctgggaacgggtctggaggcgggggtggtggtggttctgggggtgtggggatttctacgggtactttcaataatcagacggaatttaaatttttggaaaacggatgggtggaaatcacagcaaactcaagcagacttgtacatttaaatatgccagaaagtgaaaattatagaagagtggttgtaaataatttggataaaactgcagttaacggaaacatggctttagatgatacccatgcacaaattgtaacaccttggtcattggttgatgcaaatgcttggggagtttggtttaatccaggagattggcaactaattgttaatactatgagtgagttgcatttagttagttttgaacaagaaatttttaatgttgttttaaagactgtttcagaatctgctactcagccaccaactaaagtttataataatgatttaactgcatcattgatggttgcattagatagtaataatactatgccatttactccagcagctatgagatctgagacattgggtttttatccatggaaaccaaccataccaactccatggagatattattttcaatgggatagaacattaataccatctcatactggaactagtggcacaccaacaaatatataccatggtacagatccagatgatgttcaattttacactattgaaaattctgtgccagtacacttactaagaacaggtgatgaatttgctacaggaacattttattttgattgtaaaccatgtagactaacacacacatggcaaacaaatagagcattgggcttaccaccatttctaaattctttgcctcaagctgaaggaggtactaactttggttatataggagttcaacaagataaaagacgtggtgtaactcaaatgggaaatacaaacattattactgaagctactattatgagaccagctgaggttggttatagtgcaccatattattcttttgaggcgtctacacaagggccatttaaaacacctattgcagcaggacgggggggagcgcaaacagatgaaaatcaagcagcagatggtgatccaagatatgcatttggtagacaacatggtcaaaaaactaccacaacaggagaaacacctgagagatttacatatatagcacatcaagatacaggaagatatccagaaggagattggattcaaaatattaactttaaccttcctgtaacaaatgataatgtattgctaccaacagatccaattggaggtaaagcaggaattaactatactaatatatttaatacttatggtcctttaactgcattaaataatgtaccaccagtttatccaaatggtcaaatttgggataaagaatttgatactgacttaaaaccaagacttcatgtaaatgcaccatttgtttgtcaaaataattgtcctggtcaattatttgtaaaagttgcgcctaatttaacaaatgaatatgatcctgatgcatctgctaatatgtcaagaattgtaacttactcagatttttggtggaaaggtaaattagtatttaaagctaaactaagagcctctcatacttggaatccaattcaacaaatgagtattaatgtagataaccaatttaactatgtaccaagtaatattggaggtatgaaaattgtatatgaaaaatctcaactagcacctagaaaattatactaa

SEQ ID NO: 356 - DNA, 4269 bp, Canine parvovirus 2a UY492
  source 1..4269: mol_type = genomic DNA; note = Canine parvovirus 2a UY492 / Protoparvovirus carnivoran 1 - OK888579
atgtctggcaaccagtatactgaggaagttatggagggagtaaattggttaaagaaacatgcagaaaatgaagcattttcatttgtttttaaatgtgacaacgtccaactaaatggaaaggatgttcgctggaacaactataccaaaccaattcaaaatgaagagctaacatctttaattagaggagcacaaacagcaatggatcaaaccgaagaagaagaaatggactgggaatcggaagttgatagtctcgccaaaaagcaagtacaaacttttgatgcattaattaaaaaatgtctttttgaagtctttgtttctaaaaatatagaaccaaatgaatgcgtttggtttattcaacatgaatggggaaaagatcaaggctggcattgtcatgttttacttcatagtaagaacttacaacaagcaactggtaaatggctacgcagacaaatgaatatgtattggagtagatggttggtgactctttgttcggtaaacttaacaccaactgaaaaaattaagctcagagaaattgcagaagatagtgaatgggtgactatattaacatacagacataagcaaacaaaaaaagactatgttaaaatggttcattttggaaatatgatagcatattactttttaacaaagaaaaaaattgtccacatgacaaaagaaagtggctattttttaagtactgattctggttggaaatttaactttatgaagtatcaagacagacaaattgtcagcacactttacactgaacaaatgaaaccagaaaccgttgaaaccacagtgacgacagcacaggaaacaaaacgcgggagaattcaaactaaaaaggaagtgtcaatcaaatgtactttgcgggacttggttagtaaaagagtaacatcacctgaagactggatgatgttacaaccagatagttatattgaaatgatggcacaaccaggaggtgaaaatcttttaaaaaatacacttgaaatttgtactttgactttagcaagaacaaaaacagcatttgaattaatacttgaaaaagcagataatactaaactaactaactttgatcttgcaaattctagaacatgtcaaatttttagaatgcacggatggaattggattaaagtttgtcacgctatagcatgtgttttaaatagacaaggtggcaaaagaaatacagttctttttcatggaccagcaagtacaggaaaatctatcattgctcaagccatagcacaagctgtgggtaatgttggttgttataatgcagcaaatgtaaatttcccatttaatgactgtaccaataaaaatttaatttggattgaagaagctggtaactttggtcaacaagttaatcaatttaaagcaatttgttctggacaaacaattagaattgatcaaaaaggtaaaggaagtaagcaaattgaaccaactccagtaattatgacaactaatgaaaatataacaattgtgagaattggatgtgaagaaagacctgaacatacacaaccaataagagacagaatgttgaacatcaagttagtatgtaagcttccaggagactttggtttggttgataaagaagaatggcctttaatatgtgcatggttagttaaacatggttatgaatcaaccatggctaactatacacatcattggggaaaagtaccagaatgggatgaaaactgggcggagcctaaaatacaaaaaggtataaattcaccaggttgcaaagacttagagacgcaagcggcaagcaatcctcagagtcaagaccaagttctaactcctctgactccggacgtagtggaccttgcactggaaccgtggagtactccagatacgcctattgcagaaactgcaaatcaacaatcaaaccaacttggcgttactcacaaagacgtgcaagcgagtccaacgtggtccgaaatagaggcagacctgagagccatctttacttctgaacaattggaagaagattttcgagacgacttggattaaggtacgatggcacctccggcaaagagagccaggagaggtaagggtgtgttaataaggtggggggaggggaaagatttgataacttaactaagtatgtgtttttttataggacttgtgcctccaggttataaatatcttgggcctgggaacagtcttgaccaaggagaaccaactaacccttctgacgccgctgcaaaagaacacgacgaagcttacgctgcttatcttcgctctggtaaaaacccatacttatatttctcgccagcagatcaacgctttatagatcaaactaaggacgctaaagattggggggggaaaataggacattatttttttagagctaaaaaggcaattgctccagtattaactgatacaccagatcatccatcaacatcaagaccaacaaaaccaactaaaagaagtagaccaccacctcatattttcatcaatcttgcaaaaaaaaaaaaagccggtgcaggacaagtaaaaagagacaatcttgcaccaatgagtgatggagcagttcaaccagacggtggtcagcctgctgtcagaaatgaaagagctacaggatctgggaacgggtctggaggcgggggtggtggtggttctgggggtgtggggatttctacgggtactttcaataatcagacggaatttaaatttttggaaaacggatgggtggaaatcacagcaaactcaagcagacttgtacatttaaatatgccagaaagtgaaaattatagaagagtggttgtaaataatttggataaaactgcagttaacggaaacatggctttagatgatacccatgcacaaattgtaacaccttggtcattggttgatgcaaatgcttggggagtttggtttaatccaggagattggcaactaattgttaatactatgagtgagttgcatttagttagttttgaacaagaaatttttaatgttgttttaaagactgtttcagaatctgctactcagccaccaactaaagtttataataatgatttaactgcatcattgatggttgcattagatagtaataatactatgccatttactccagcagctatgagatctgagacattgggtttttatccatggaaaccaaccataccaactccatggagatattattttcaatgggatagaacattaataccatctcatactggaactagtggcacaccaacaaatatataccatggtacagatccagatgatgttcaattttacactattgaaaattctgtgccagtacacttactaagaacaggtgatgaatttgctacaggaacattttattttgattgtaaaccatgtagactaacacacacatggcaaacaaatagagcattgggcttaccaccatttctaaattctttgcctcaagctgaaggaggtactaactttggttatataggagttcaacaagataaaagacgtggtgtaactcaaatgggaaatacaaacattattactgaagctactattatgagaccagctgaggttggttatagtgcaccatattattcttttgaggcgtctacacaagggccatttaaaacacctattgcagcaggacgggggggagcgcaaacagatgaaaatcaagcagcagatggtgatccaagatatgcatttggtagacaacatggtcaaaaaactaccacaacaggagaaacacctgagagatttacatatatagcacatcaagatacaggaagatatccagaaggagattggattcaaaatattaactttaaccttcctgtaacaaatgataatgtattgctaccaacagatccaattggaggtaaagcaggaattaactatactaatatatttaatacttatggtcctttaactgcattaaataatgtaccaccagtttatccaaatggtcaaatttgggataaagaatttgatactgacttaaaaccaagacttcatgtaaatgcaccatttgtttgtcaaaataattgtcctggtcaattatttgtaaaagttgcgcctaatttaacaaatgaatatgatcctgatgcatctgctaatatgtcaagaattgtaacttactcagatttttggtggaaaggtaaattagtatttaaagctaaactaagagcctctcatacttggaatccaattcaacaaatgagtattaatgtagataaccaatttaactatgtaccaagtaatattggaggtatgaaaattgtatatgaaaaatctcaactagcacctagaaaattatactaa

SEQ ID NO: 357 - DNA, 4269 bp, Canine parvovirus 2a UY503
  source 1..4269: mol_type = genomic DNA; note = Canine parvovirus 2a UY503 / Protoparvovirus carnivoran 1 - OK888580
atgtctggcaaccagtatactgaggaagttatggagggagtaaattggttaaagaaacatgcagaaaatgaagcattttcatttgtttttaaatgtgacaacgtccaactaaatggaaaggatgttcgctggaacaactataccaaaccaattcaaaatgaagagctaacatctttaattagaggagcacaaacagcaatggatcaaaccgaagaagaagaaatggactgggaatcggaagttgatagtctcgccaaaaagcaagtacaaacttttgatgcattaattaaaaaatgtctttttgaagtctttgtttctaaaaatatagaaccaaatgaatgcgtttggtttattcaacatgaatggggaaaagatcaaggctggcattgtcatgttttacttcatagtaagaacttacaacaagcaactggtaaatggctacgcagacaaatgaatatgtattggagtagatggttggtgactctttgttcggtaaacttaacaccaactgaaaaaattaaactcagagaaattgcagaagatagtgaatgggtgactatattaacatacagacataagcaaacaaaaaaagactatgttaaaatggttcattttggaaatatgatagcatattactttttaacaaagaaaaaaattgtccacatgacaaaagaaagtggctattttttaagtactgattctggttggaaatttaactttatgaagtatcaagacagacaaattgtcagcacactttacactgaacaaatgaaaccagaaaccgttgaaaccacagtgacgacagcacaggaaacaaagcgcgggagaattcaaactaaaaaggaagtgtcaatcaaatgtactttgcgggacttggttagtaaaagagtaacatcacctgaagactggatgatgttacaaccagatagttatattgaaatgatggcacaaccaggaggtgaaaatcttttaaaaaatacacttgaaatttgtactttgactttagcaagaacaaaaacagcatttgaattaatacttgaaaaagcagataatactaaactaactaactttgatcttgcaaattctagaacatgtcaaatttttagaatgcacggatggaattggattaaagtttgtcacgctatagcatgtgttttaaatagacaaggtggcaaaagaaatacagttctttttcatggaccagcaagtacaggaaaatctatcattgctcaagccatagcacaagctgtgggtaatgttggttgttataatgcagcaaatgtaaattttccatttaatgactgtaccaataaaaatttaatttggattgaagaagctggtaactttggtcaacaagttaatcaatttaaagcaatctgttctggacaaacaattagaattgatcaaaaaggtaaaggaagtaagcaaattgaaccaactccagtaattatgacaactaatgaaaatataacaattgtgagaattggatgtgaagaaagacctgaacatacacaaccaataagagacagaatgttgaacatcaagttagtatgtaagcttccaggagactttggtttggttgataaagaagaatggcctttaatatgtgcatggttagttaaacatggttatgaatcaaccatggctaactatacacatcattggggaaaagtaccagaatgggatgaaaactgggcggagcctaaaatacaaaaaagtataaattcaccaggttgcaaagacttagagacgcaagcggcaagcaatcctcagagtcaagaccaagttctaactcctctgactccggacgtagtggaccttgcactggaaccgtggagtactccagatacgcctattgcagaaactgcaaatcaacaatcaaaccaacttggcgttactcacaaagacgtgcaagcgagtccaacgtggtccgaaatagaggcagacctgagagccatctttacttctgaacaattggaagaagattttcgagacgacttggattaaggtacgatggcacctccggcaaagagagccaggagaggtaagggtgtgttaataaggtggggggaggggaaagatttgataacttaactaagtatgtgtttttttataggacttgtgcctccaggttataaatatcttgggcctgggaacagtcttgaccaaggagaaccaactaacccttctgacgccgctgcaaaagaacacgacgaagcttacgctgcttatcttcgctctggtaaaaacccatacttatatttctcgccagcagatcaacgctttatagatcaaactaaggacgctaaagattggggggggaaaataggacattatttttttagagctaaaaaggcaattgctccagtattaactgatacaccagatcatccatcaacatcaagaccaacaaaaccaactaaaagaagtagaccaccacctcatattttcatcaatcttgcaaaaaaaaaaaaagccggtgcaggacaagtaaaaagagacaatcttgcaccaatgagtgatggagcagttcaaccagacggtggtcagcctgctgtcagaaatgaaagagctacaggatctgggaacgggtctggaggcgggggtggtggtggttctgggggtgtggggatttctacgggtactttcaataatcagacggaatttaaatttttggaaaacggatgggtggaaatcacagcaaactcaagcagacttgtacatttaaatatgccagaaagtgaaaattatagaagagtggttgtaaataatttggataaaactgcagttaacggaaacatggctttagatgatacccatgcacaaattgtaacaccttggtcattggttgatgcaaatgcttggggagtttggtttaatccaggagattggcaactaattgttaatactatgagtgagttgcatttagttagttttgaacaagaaatttttaatgttgttttaaagactgtttcagaatctgctactcagccaccaactaaagtttataataatgatttaactgcatcattgatggttgcattagatagtaataatactatgccatttactccagcagctatgagatctgagacattgggtttttatccatggaaaccaaccataccaactccatggagatattattttcaatgggatagaacattaataccatctcatactggaactagtggcacaccaacaaatatataccatggtacagatccagatgatgttcaattttacactattgaaaattctgtgccagtacacttactaagaacaggtgatgaatttgctacaggaacattttattttgattgtaaaccatgtagactaacacacacatggcaaacaaatagagcattgggcttaccaccatttctaaattctttgcctcaagctgaaggaggtactaactttggttatataggagttcaacaagataaaagacgtggtgtaactcaaatgggaaatacaaacattattactgaagctactattatgagaccagctgaggttggttatagtgcaccatattattcttttgaggcgtctacacaagggccatttaaaacacctattgcagcaggacgggggggagcgcaaacagatgaaaatcaagcagcagatggtgatccaagatatgcatttggtagacaacatggtcaaaaaactaccacaacaggagaaacacctgagagatttacatatatagcacatcaagatacaggaagatatccagaaggagattggattcaaaatattaactttaaccttcctgtaacaaatgataatgtattgctaccaacagatccaattggaggtaaagcaggaattaactatactaatatatttaatacttatggtcctttaactgcattaaataatgtaccaccagtttatccaaatggtcaaatttgggataaagaatttgatactgacttaaaaccaagacttcatgtaaatgcaccatttgtttgtcaaaataattgtcctggtcaattatttgtaaaagttgcgcctaatttaacaaatgaatatgatcctgatgcatctgctaatatgtcaagaattgtaacttactcagatttttggtggaaaggtaaattagtatttaaagctaaactaagagcctctcatacttggaatccaattcaacaaatgagtattaatgtagataaccaatttaactatgtaccaagtaatattggaggtatgaaaattgtatatgaaaaatctcaactagcacctagaaaattatactaa

SEQ ID NO: 358 - DNA, 4269 bp, Canine parvovirus 2a UY520; identical to SEQ ID NO: 355
  source 1..4269: mol_type = genomic DNA; note = Canine parvovirus 2a UY520 / Protoparvovirus carnivoran 1 - OK888581

SEQ ID NO: 359 - DNA, 4269 bp, Canine parvovirus 2a UY530; identical to SEQ ID NO: 339
  source 1..4269: mol_type = genomic DNA; note = Canine parvovirus 2a UY530 / Protoparvovirus carnivoran 1 - OK888582

SEQ ID NO: 360 - DNA, 4269 bp, Canine parvovirus 2a UY540
  source 1..4269: mol_type = genomic DNA; note = Canine parvovirus 2a UY540 / Protoparvovirus carnivoran 1 - OK888583
atgtctggcaaccagtatactgaggaagttatggagggagtaaattggttaaagaaacatgcagaaaatgaagcattttcatttgtttttaaatgtgacaacgtccaactaaatggaaaggatgttcgctggaacaactataccaaaccaattcaaaatgaagagctaacatctttaattagaggagcacaaacagcaatggatcaaaccgaagaagaagaaatggactgggaatcggaagttgatagtctcgccaaaaagcaagtacaaacttttgatgcattaattaaaaaatgtctttttgaagtctttgtttctaaaaatatagaaccaaatgaatgcgtttggtttattcaacatgaatggggaaaagatcaaggctggcattgtcatgttttacttcatagtaagaacttacaacaagcaactggtaaatggctacgcagacaaatgaatatgtattggagtagatggttggtgactctttgttcggtaaacttaacaccaactgaaaaaattaagctcagagaaattgcagaagatagtgaatgggtgactatattaacatacagacataagcaaacaaaaaaagactatgttaaaatggttcattttggaaatatgatagcatattactttttaacaaagaaaaaaattgtccacatgacaaaagaaagtggctattttttaagtactgattctggttggaaatttaactttatgaagtatcaagacagacaaattgtcagcacactttacactgaacaaatgaaaccagaaaccgttgaaaccacagtgacgacagcacaggaaacaaagcgcgggagaattcaaactaaaaaggaagtgtcaatcaaatgtactttgcgggacttggttagtaaaagagtaacatcacctgaagactggatgatgttacaaccagatagttatattgaaatgatggcacaaccaggaggtgaaaatcttttaaaaaatacacttgaaatttgtactttgactttagcaagaacaaaaacagcatttgaattaatacttgaaaaagcagataatactaaactaactaactttgatcttgcaaattctagaacatgtcaaatttttagaatgcacggatggaattggattaaagtttgtcacgctatagcatgtgttttaaatagacaaggtggcaaaagaaatacagttctttttcatggaccagcaagtacaggaaaatctatcattgctcaagccatagcacaagctgtgggtaatgttggttgttataatgcagcaaatgtaaattttccatttaatgactgtaccaataaaaatttaatttggattgaagaagctggtaactttggtcaacaagttaatcaatttaaagcaatctgttctggacaaacaattagaattgatcaaaaaggtaaaggaagtaagcaaattgaaccaactccagtaattatgacaactaatgaaaatataacaattgtgagaattggatgtgaagaaagacctgaacatacacaaccaataagagacagaatgttgaacatcaagttagtatgtaagcttccaggagactttggtttggttgataaagaagaatggcctttaatatgtgcatggttagttaaacatggttatgaatcaaccatggctaactatacacatcattggggaaaagtaccagaatgggatgaaaactgggcggagcctaaaatacaaaaaggtataaattcaccaggttgcaaagacttagagacgcaagcggcaagcaatcctcagagtcaagaccaagttctaactcctctgactccggacgtagtggaccttgcactggaaccgtggagtactccagatacgcctattgcagaaactgcaaatcaacaatcaaaccaacttggcgttactcacaaagacgtgcaagcgagtccaacgtggtccgaaatagaggcagacctgagagccatctttacttctgaacaattggaagaagattttcgagacgacttggattaaggtacgatggcacctccggcaaagagagccaggagaggtaagggtgtgttaataaggtggggggaggggaaagatttgataacttaactaagtatgtgtttttttataggacttgtgcctccaggttataaatatcttgggcctgggaacagtcttgaccaaggagaaccaactaacccttctgacgccgctgcaaaagaacacgacgaagcttacgctgcttatcttcgctctggtaaaaacccatacttatatttctcgccagcagatcaacgctttatagatcaaactaaggacgctaaagattggggggggaaaataggacattatttttttagagctaaaaaggcaattgctccagtattaactgatacaccagatcatccatcaacatcaagaccaacaaaaccaactaaaagaagtagaccaccacctcatattttcatcaatcttgcaaaaaaaaaaaaagccggtgcaggacaagtaaaaagagacaatcttgcaccaatgagtgatggagcagttcaaccagacggtggtcagcctgctgtcagaaatgaaagagctacaggatctgggaacgggtctggaggcgggggtggtggtggttctgggggtgtggggatttctacgggtactttcaataatcagacggaatttaaatttttggaaaacggatgggtggaaatcacagcaaactcaagcagacttgtacatttaaatatgccagaaagtgaaaattatagaagagtagttgtaaataatttggataaaactgcagttaacggaaacatggctttagatgatacccatgcacaaattgtaacaccttggtcattggttgatgcaaatgcttggggagtttggtttaatccaggagattggcaactaattgttaatactatgagtgagttgcatttagttagttttgaacaagaaatttttaatgttgttttaaagactgtttcagaatctgctactcagccaccaactaaagtttataataatgatttaactgcatcattgatggttgcattagatagtaataatactatgccatttactccagcagctatgagatctgagacattgggtttttatccatggaaaccaaccataccaactccatggagatattattttcaatgggatagaacattaataccatctcatactggaactagtggcacaccaacaaatatatatcatggtacagatccagatgatgttcaattttacactattgaaaattctgtgccagtacacttactaagaacaggtgatgaatttgctacaggaacattttattttgattgtaaaccatgtagactaacacacacatggcaaacaaatagagcattgggcttaccaccatttctaaattctttgcctcaagctgaaggaggtactaactttggttatataggagttcaacaagataaaagacgtggtgtaactcaaatgggaaatacaaacattattactgaagctactattatgagaccagctgaggttggttatagtgcaccatattattcttttgaggcgtctacacaagggccatttaaaacacctattgcagcaggacgggggggagcgcaaacagatgaaaatcaagcagcagatggtgatccaagatatgcatttggtagacaacatggtcaaaaaactaccacaacaggagaaacacctgagagatttacatatatagcacatcaagatacaggaagatatccagaaggagattggattcaaaatattaactttaaccttcctgtaacaaatgataatgtattgctaccaacagatccaattggaggtaaagcaggaattaactatactaatatatttaatacttatggtcctttaactgcattaaataatgtaccaccagtttatccaaatggtcaaatttgggataaagaatttgatactgacttaaaaccaagacttcatgtaaatgcaccatttgtttgtcaaaataattgtcctggtcaattatttgtaaaagttgcgcctaatttaacaaatgaatatgatcctgatgcatctgctaatatgtcaagaattgtaacttactcagatttttggtggaaaggtaaattagtatttaaagctaaactaagagcctctcatacttggaatccaattcaacaaatgagtattaatgtagataaccaatttaactatgtaccaagtaatattggaggtatgaaaattgtatatgaaaaatctcaactagcacctagaaaattatactaa

SEQ ID NO: 361 - DNA, 4269 bp, Canine parvovirus 2a UY568; identical to SEQ ID NO: 337
  source 1..4269: mol_type = genomic DNA; note = Canine parvovirus 2a UY568 / Protoparvovirus carnivoran 1 - OK888584

SEQ ID NO: 362 - DNA, 4268 bp, Canine parvovirus 2a UY579
  source 1..4268: mol_type = genomic DNA; note = Canine parvovirus 2a UY579 / Protoparvovirus carnivoran 1 - OK888585
atgtctggcaaccagtatactgaggaagttatggagggagtaaattggttaaagaaacatgcagaaaatgaagcattttcatttgtttttaaatgtgacaacgtccaactaaatggaaaggatgttcgctggaacaactataccaaaccaattcaaaatgaagagctaacatctttaattagaggagcacaaacagcaatggatcaaaccgaagaagaagaaatggactgggaatcggaagttgatagtctcgccaaaaagcaagtacaaacttttgatgcattaattaaaaaatgtctttttgaagtctttgtttctaaaaatatagaaccaaatgaatgcgtttggtttattcaacatgaatggggaaaagatcaaggctggcattgtcatgttttacttcatagtaagaacttacaacaagcaactggtaaatggctacgcagacaaatgaatatgtattggagtagatggttggtgactctttgttcggtaaacttaacaccaactgaaaaaattaagctcagagaaattgcagaagatagtgaatgggtgactatattaacatacagacataagcaaacaaaaaaagactatgttaaaatggttcattttggaaatatgatagcatattactttttaacaaagaaaaaaattgtccacatgacaaaagaaagtggctattttttaagtactgattctggttggaaatttaactttatgaagtatcaagacagacaaattgtcagcacactttacactgaacaaatgaaaccagaaaccgttgaaaccacagtgacgacagcacaggaaacaaagcgcgggagaattcaaactaaaaaggaagtgtcaatcaaatgtactttgcgggacttggttagtaaaagagtaacatcacctgaagactggatgatgttacaaccagatagttatattgaaatgatggcacaaccaggaggtgaaaatcttttaaaaaatacacttgaaatttgtactttgactttagcaagaacaaaaacagcatttgaattaatacttgaaaaagcagataatactaaactaactaactttgatcttgcaaattctagaacatgtcaaatttttagaatgcacggatggaattggattaaagtttgtcacgctatagcatgtgttttaaatagacaaggtggcaaaagaaatacagttctttttcatggaccagcaagtacaggaaaatctatcattgctcaagccatagcacaagctgtgggtaatgttggttgttataatgcagcaaatgtaaattttccatttaatgactgtaccaataaaaatttaatttggattgaagaagctggtaactttggtcaacaagttaatcaatttaaagcaatttgttctggacaaacaattagaattgatcaaaaaggtaaaggaagtaagcaaattgaaccaactccagtaattatgacaactaatgaaaatataacaattgtgagaattggatgtgaagaaagacctgaacatacacaaccaataagagacagaatgttgaacatcaagttagtatgtaagcttccaggagactttggtttggttgataaagaagaatggcctttaatatgtgcatggttagttaaacatggttatgaatcaaccatggctaactatacacatcattggggaaaagtaccagaatgggatgaaaactgggcggagcctaaaatacaaaaaggtataaattcaccaggttgcaaagacttagagacgcaagcggcaagcaatcctcagagtcaagaccaagttctaactcctctgactccggacgtagtggaccttgcactggaaccgtggagtactccagatacgcctattgcagaaactgcaaatcaacaatcaaaccaacttggcgttactcacaaagacgtgcaagcgagtccaacgtggtccgaaatagaggcagacctgagagccatctttacttctgaacaattggaagaagattttcgagacgacttggattaaggtacgatggcacctccggcaaagagagccaggagaggtaagggtgtgttaataaggtggggggaggggaaagatttgataacttaactaagtatgtgtttttttataggacttgtgcctccaggttataaatatcttgggcctgggaacagtcttgaccaaggagaaccaactaacccttctgacgccgctgcaaaagaacacgacgaagcttacgctgcttatcttcgctctggtaaaaacccatacttatatttctcgccagcagatcaacgctttatagatcaaactaaggacgctaaagattggggggggaaaataggacattatttttttagagctaaaaaggcaattgctccagtattaactgatacaccagatcatccatcaacatcaagaccaacaaaaccaactaaaagaagtagaccaccacctcatattttcatcaatcttgcaaaaaaaaaaaaagccggtgcaggacaagtaaaaagagacaatcttgcaccaatgagtgatggagcagttcaaccagacggtggtcagcctgctgtcagaaatgaaagagctacaggatctgggaacgggtctggaggcgggggtggtggtggttctgggggtgtggggatttctacgggtactttcaataatcagacggaatttaaatttttggaaaacggatgggtggaaatcacagcaaactcaagcagacttgtacatttaaatatgccagaaagtgaaaattatagaagagtggttgtaaataatttggataaaactgcagttaacggaaacatggctttagatgatacccatgcacaaattgtaacaccttggtcattggttgatgcaaatgcttggggagtttggtttaatccaggagattggcaactaattgttaatactatgagtgagttgcatttagttagttttgaacaagaaatttttaatgttgttttaaagactgtttcagaatctgctactcagccaccaactaaagtttataataatgatttaactgcatcattgatggttgcattagatagtaataatactatgccatttactccagcagctatgagatctgagacattgggtttttatccatggaaaccaaccataccaactccatggagatattattttcaatgggatagaacattaataccatctcatactggaactagtggcacaccaacaaatatataccatggtacagatccagatgatgttcaattttacactattgaaaattctgtgccagtacacttactaagaacaggtgatgaatttgctacaggaacattttattttgattgtaaaccatgtagactaacacacacatggcaaacaaatagagcattgggcttaccaccatttctaaattctttgcctcaagctgaaggaggtactaactttggttatataggagttcaacaagataaaagacgtggtgtaactcaaatgggaaatacaaacattattactgaagctactattatgagaccagctgaggttggttatagtgcaccatattattcttttgaggcgtctacacaagggccatttaaaacacctattgcagcaggacgggggggagcgcaaacagatgaaaatcaagcagcagatggtgatccaagatatgcatttggtagacaacatggtcaaaaaactaccacaacaggagaaacacctgagagatttacatatatagcacatcaagatacaggaagatatccagaaggagattggattcaaaatattaactttaaccttcctgtaacaaatgataatgtattgctaccaacagatccaattggaggtaaagcaggaattaactatactaatatatttaatacttatggtcctttaactgcattaaataatgtaccaccagtttatccaaatggtcaaatttgggataaagaatttgatactgacttaaaaccaagacttcatgtaaatgcaccatttgtttgtcaaaataattgtcctggtcaattatttgtaaaagttgcgcctaatttaacaaatgaatatgatcctgatgcatctgctaatatgtcaagaattgtaacttactcagatttttggtggaaaggtaaattagtatttaaagctaaactaagagcctctcatacttggaatccaattcaacaaatgagtattaatgtagataaccaatttaactatgtaccaagtaatattggaggtatgaaaattgtatatgaaaaatctcaactagcacctagaaaattatacta

SEQ ID NO: 363 - DNA, 4269 bp, Canine parvovirus 2a UY593
  source 1..4269: mol_type = genomic DNA; note = Canine parvovirus 2a UY593 / Protoparvovirus carnivoran 1 - OK888586
atgtctggcaaccagtatactgaggaagttatggagggagtaaattggttaaagaaacacgcagaaaatgaagcattttcatttgtttttaaatgtgacaacgtccaactaaatggaaaggatgttcgctggaacaactataccaaaccaattcaaaatgaagagctaacatctttaattagaggagcacaaacagcaatggatcaaaccgaagaagaagaaatggactgggaatcggaagttgatagtctcgccaaaaagcaagtacaaacttttgatgcattaattaaaaaatgtctttttgaagtctttgtttctaaaaatatagaaccaaatgaatgcgtttggtttattcaacatgaatggggaaaagatcaaggctggcattgtcatgttttacttcatagtaagaacttacaacaagcaactggtaaatggctacgcagacaaatgaatatgtattggagtagatggttggtgactctttgttcggtaaacttaacaccaactgaaaaaattaagctcagagaaattgcagaagatagtgaatgggtgactatattaacatacagacataagcaaacaaaaaaagactatgttaaaatggttcattttggaaatatgatagcatattactttttaacaaagaaaaaaattgtccacatgacaaaagaaagtggctattttttaagtactgattctggttggaaatttaactttatgaagtatcaagacagacaaattgtcagcacactttacactgaacaaatgaaaccagaaaccgttgaaaccacagtgacgacagcacaggaaacaaagcgcgggagaattcaaactaaaaaggaagtgtcaatcaaatgtactttgcgggacttggttagtaaaagagtaacatcacctgaagactggatgatgttacaaccagatagttatattgaaatgatggcacaaccaggaggtgaaaatcttttaaaaaatacacttgaaatttgtactttgactttagcaagaacaaaaacagcatttgaattaatacttgaaaaagcagataatactaaactaactaactttgatcttgcaaattctagaacatgtcaaatttttagaatgcacggatggaattggattaaagtttgtcacgctatagcatgtgttttaaatagacaaggtggcaaaagaaatacagttctttttcatggaccagcaagtacaggaaaatctatcattgctcaagccatagcacaagctgtgggtaatgttggttgttataatgcagcaaatgtaaattttccatttaatgactgtaccaataaaaatttaatttggattgaagaagctggtaactttggtcaacaagttaatcaatttaaagcaatttgttctggacaaacaattagaattgatcaaaaaggtaaaggaagtaagcaaattgaaccaactccagtaattatgacaactaatgaaaatataacaattgtgagaattggatgtgaagaaagacctgaacatacacaaccaataagagacagaatgttgaacatcaagttagtatgtaagcttccaggagactttggtttggttgataaagaagaatggcctttaatatgtgcatggttagttaaacatggttatgaatcaaccatggctaactatacacatcattggggaaaagtaccagaatgggatgaaaactgggcggagcctaaaatacaaaaaggtataaattcaccaggttgcaaagacttagagacgcaagcggcaagcaatcctcagagtcaagaccaagttctaactcctctgactccggacgtagtggaccttgcactggaaccgtggagtactccagatacgcctattgcagaaactgcaaatcaacaatcaaaccaacttggcgttactcacaaagacgtgcaagcgagtccaacgtggtccgaaatagaggcagacctgagagccatctttacttctgaacaattggaagaagattttcgagacgacttggattaaggtacgatggcacctccggcaaagagagccaggagaggtaagggtgtgttaataaggtggggggaggggaaagatttgataacttaactaagtatgtgtttttttataggacttgtgcctccaggttataaatatcttgggcctgggaacagtcttgaccaaggagaaccaactaacccttctgacgccgctgcaaaagaacacgacgaagcttacgctgcttatcttcgctctggtaaaaacccatacttatatttctcgccagcagatcaacgctttatagatcaaactaaggacgctaaagattggggggggaaaataggacattatttttttagagctaaaaaggcaattgctccagtattaactgatacaccagatcatccatcaacatcaagaccaacaaaaccaactaaaagaagtagaccaccacctcatattttcatcaatcttgcaaaaaaaaaaaaagccggtgcaggacaagtaaaaagagacaatcttgcaccaatgagtgatggagcagttcaaccagacggtggtcagcctgctgtcagaaatgaaagagctacaggatctgggaacgggtctggaggcgggggtggtggtggttctgggggtgtggggatttctacgggtactttcaataatcagacggaatttaaatttttggaaaacggatgggtggaaatcacagcaaactcaagcagacttgtacatttaaatatgccagaaagtgaaaattatagaagagtggttgtaaataatttggataaaactgcagttaacggaaacatggctttagatgatacccatgcacaaattgtaacaccttggtcattggttgatgcaaatgcttggggagtttggtttaatccaggagattggcaactaattgttaatactatgagtgagttgcatttagttagttttgaacaagaaatttttaatgttgttttaaagactgtttcagaatctgctactcagccaccaactaaagtttataataatgatttaactgcatcattgatggttgcattagatagtaataatactatgccatttactccagcagctatgagatctgagacattgggtttttatccatggaaaccaaccataccaactccatggagatattattttcaatgggatagaacattaataccatctcatactggaactagtggcacaccaacaaatatataccatggtacagatccagatgatgttcaattttacactattgaaaattctgtgccagtacacttactaagaacaggtgatgaatttgctacaggaacattttattttgattgtaaaccatgtagactaacacacacatggcaaacaaatagagcattgggcttaccaccatttctaaattctttgcctcaagctgaaggaggtactaactttggttatataggagttcaacaagataaaagacgtggtgtaactcaaatgggaaatacaaacattattactgaagctactattatgagaccagctgaggttggttatagtgcaccatattattcttttgaggcgtctacacaagggccatttaaaacacctattgcagcaggacgggggggagcgcaaacagatgaaaatcaagcagcagatggtgatccaagatatgcatttggtagacaacatggtcaaaaaactaccacaacaggagaaacacctgagagatttacatatatagcacatcaagatacaggaagatatccagaaggagattggattcaaaatattaactttaaccttcctgtaacaaatgataatgtattgctaccaacagatccaattggaggtaaagcaggaattaactatactaatatatttaatacttatggtcctttaactgcattaaataatgtaccaccagtttatccaaatggtcaaatttgggataaagaatttgatactgacttaaaaccaagacttcatgtaaatgcaccatttgtttgtcaaaataattgtcctggtcaattatttgtaaaagttgcgcctaatttaacaaatgaatatgatcctgatgcatctgctaatatgtcaagaattgtaacttactcagatttttggtggaaaggtaaattagtatttaaagctaaactaagagcctctcatacttggaatccaattcaacaaatgagtattaatgtagataaccaatttaactatgtaccaagtaatattggaggtatgaaaattgtatatgaaaaatctcaactagcacctagaaaattatactaa

SEQ ID NO: 364 - DNA, 4269 bp, Canine parvovirus 2a UY607
  source 1..4269: mol_type = genomic DNA; note = Canine parvovirus 2a UY607 / Protoparvovirus carnivoran 1 - OK888587
atgtctggcaaccagtatactgaggaagttatggagggagtaaattggttaaagaaacatgcagaaaatgaagcattttcatttgtttttaaatgtgacaacgtccaactaaatggaaaggatgttcgctggaacaactataccaaaccaattcaaaatgaagagctaacatctttaattagaggagcacaaacagcaatggatcaaaccgaagaagaagaaatggactgggaatcggaagttgatagtctcgccaaaaagcaagtacaaacttttgatgcattaattaaaaaatgtctttttgaagtctttgtttctaaaaatatagaaccaaatgaatgcgtttggtttattcaacatgaatggggaaaagatcaaggctggcattgtcatgttttacttcatagtaagaacttacaacaagcaactggtaaatggctacgcagacaaatgaatatgtattggagtagatggttggtgactctttgttcggtaaacttaacaccaactgaaaaaattaagctcagagaaattgcagaagatagtgaatgggtgactatattaacatacagacataagcaaacaaaaaaagactatgttaaaatggttcattttggaaatatgatagcatattactttttaacaaagaaaaaaattgtccacatgacaaaagaaagtggctattttttaagtactgattctggttggaaatttaactttatgaagtatcaagacagacaaattgtcagcacactttacactgaacaaatgaaaccagaaaccgttgaaaccacagtgacgacagcacaggaaacaaagcgcgggagaattcaaactaaaaaggaagtgtcaatcaaatgtactttgcgggacttggttagtaaaagagtgacatcacctgaagactggatgatgttacaaccagatagttatattgaaatgatggcacaaccaggaggtgaaaatcttttaaaaaatacacttgaaatttgtactttgactttagcaagaacaaaaacagcatttgaattaatacttgaaaaagcagataatactaaactaactaactttgatcttgcaaattctagaacatgtcaaatttttagaatgcacggatggaattggattaaagtttgtcacgctatagcatgtgttttaaatagacaaggtggcaaaagaaatacagttctttttcatggaccagcaagtacaggaaaatctatcattgctcaagccatagcacaagctgtgggtaatgttggttgttataatgcagcaaatgtaaattttccatttaatgactgtaccaataaaaatttaatttggattgaagaagctggtaactttggtcaacaagttaatcaatttaaagcaatttgttctggacaaacaattagaattgatcaaaaaggtaaaggaagtaagcaaattgaaccaactccagtaattatgacaactaatgaaaatataacaattgtgagaattggatgtgaagaaagacctgaacatacacaaccaataagagacagaatgttgaacatcaagttagtatgtaagcttccaggagactttggtttggttgataaagaagaatggcctttaatatgtgcatggttagttaaacatggttatgaatcaaccatggctaactatacacatcattggggaaaagtaccagaatgggatgaaaactgggcggagcctaaaatacaaaaaggtataaattcaccaggttgcaaagacttagagacgcaagcggcaagcaatcctcagagtcaagaccaagttctaactcctctgactccggacgtagtggaccttgcactggaaccgtggagtactccagatacgcctattgcagaaactgcaaatcaacaatcaaaccaacttggcgttactcacaaagacgtacaagcgagtccaacgtggtccgaaatagaggcagacctgagagccatctttacttctgaacaattggaagaagattttcgagacgacttggattaaggtacgatggcacctccggcaaagagagccaggagaggtaagggtgtgttaataaggtggggggaggggaaagatttgataacttaactaagtatgtgtttttttataggacttgtgcctccaggttataaatatcttgggcctgggaacagtcttgaccaaggagaaccaactaacccttctgacgccgctgcaaaagaacacgacgaagcttacgctgcttatcttcgctctggtaaaaacccatacttatatttctcgccagcagatcaacgctttatagatcaaactaaggacgctaaagattggggggggaaaataggacattatttttttagagctaaaaaggcaattgctccagtgttaactgatacaccagatcatccatcaacatcaagaccaacaaaaccaactaaaagaagtagaccaccacctcatattttcatcaatcttgcaaaaaaaaaaaaagccggtgcaggacaagtaaaaagagacaatcttgcaccaatgagtgatggagcagttcaaccagacggtggtcagcctgctgtcagaaatgaaagagctacaggatctgggaacgggtctggaggcgggggtggtggtggttctgggggtgtggggatttctacgggtactttcaataatcagacggaatttaaatttttggaaaacggatgggtggaaatcacagcaaactcaagcagacttgtacatttaaatatgccagaaagtgaaaattatagaagagtggttgtaaataatttggataaaactgcagttaacggaaacatggctttagatgatacccatgcacaaattgtaacaccttggtcattggttgatgcaaatgcttggggagtttggtttaatccaggagattggcaactaattgttaatactatgagtgagttgcatttagttagttttgaacaagaaatttttaatgttgttttaaagactgtttcagaatctgctactcagccaccaactaaagtctataataatgatttaactgcatcattgatggttgcattagatagtaataatactatgccatttactccagcagctatgagatctgagacattgggtttttatccatggaaaccaaccataccaactccatggagatattattttcaatgggatagaacattaataccatctcatactggaactagtggcacaccaacaaatatataccatggtacagatccagatgatgttcaattttacactattgaaaattctgtgccagtacacttactaagaacaggtgatgaatttgctacaggaacattttattttgattgtaaaccatgtagactaacacacacatggcaaacaaatagagcattgggcttaccaccatttctaaattctttgcctcaagctgaaggaggtactaactttggttatataggagttcaacaagataaaagacgtggtgtaactcaaatgggaaatacaaacattattactgaagctactattatgagaccagctgaggttggttatagtgcaccatattattcttttgaggcgtctacacaagggccatttaaaacacctattgcagcaggacgggggggagcgcaaacagatgaaaatcaagcagcagatggtgatccaagatatgcatttggtagacaacatggtcaaaaaactaccacaacaggagaaacacctgagagatttacatatatagcacatcaagatacaggaagatatccagaaggagattggattcaaaatattaactttaaccttcctgtaacaaatgataatgtattgctaccaacagatccaattggaggtaaagcaggaattaactatactaatatatttaatacttatggtcctttaactgcattaaataatgtaccaccagtttatccaaatggtcaaatttgggataaagaatttgatactgacttaaaaccaagacttcatgtaaatgcaccatttgtttgtcaaaataattgtcctggtcaattatttgtaaaagttgcgcctaatttaacaaatgaatatgatcctgatgcatctgctaatatgtcaagaattgtaacttactcagatttttggtggaaaggtaaattagtatttaaagctaaactaagagcctctcatacttggaatccaattcaacaaatgagtattaatgtagataaccaatttaactatgtaccaagtaatattggaggtatgaaaattgtatatgaaaaatctcaactagcacctagaaaattatactaa

SEQ ID NO: 365 - DNA, 4269 bp, Canine parvovirus 2a UY618
  source 1..4269: mol_type = genomic DNA; note = Canine parvovirus 2a UY618 / Protoparvovirus carnivoran 1 - OK888588
atgtctggcaaccagtatactgaggaagttatggagggagtaaattggttaaagaaacatgcagaaaatgaagcattttcatttgtttttaaatgtgacaacgtccaactaaatggaaaggatgttcgctggaacaactataccaaaccaattcaaaatgaagagctaacatctttaattagaggagcacaaacagcaatggatcaaaccgaagaagaagaaatggactgggaatcggaagttgatagtctcgccaaaaagcaagtacaaacttttgatgcattaattaaaaaatgtctttttgaaatctttgtttctaaaaatatagaaccaaatgaatgcgtttggtttattcaacatgaatggggaaaagatcaaggctggcattgtcatgttttacttcatagtaagaacttacaacaagcaactggtaaatggctacgcagacaaatgaatatgtattggagtagatggttggtgactctttgttcggtaaacttaacaccaactgaaaaaattaagctcagagaaattgcagaagatagtgaatgggtgactatattaacatacagacataagcaaacaaaaaaagactatgttaaaatggttcattttggaaatatgatagcatattactttttaacaaagaaaaaaattgtccacatgacaaaagaaagtggctattttttaagtactgattctggttggaaatttaactttatgaagtatcaagacagacaaattgtcagcacactttacactgaacaaatgaaaccagaaaccgttgaaaccacagtgacgacagcacaggaaacaaagcgcgggagaattcaaactaaaaaggaagtgtcaatcaaatgtactttgcgggacttggttagtaaaagagtaacatcacctgaagactggatgatgttacaaccagatagttatattgaaatgatggcacaaccaggaggtgaaaatcttttaaaaaatacacttgaaatttgtactttgactttagcaagaacaaaaacagcatttgaattaatacttgaaaaagcagacaatactaaactaactaactttgatcttgcaaattctagaacatgtcaaatttttagaatgcacggatggaattggattaaagtttgtcacgctatagcatgtgttttaaatagacaaggtggcaaaagaaatacagttctttttcatggaccagcaagtacaggaaaatctatcattgctcaagccatagcacaagctgtaggtaatgttggttgttataatgcagcaaatgtaaattttccatttaatgactgtaccaataaaaatttaatttggattgaagaagctggtaactttggtcaacaagttaatcaatttaaagcaatctgttctggacaaacaattagaattgatcaaaaaggtaaaggaagtaagcaaattgaaccaactccagtaattatgacaactaatgaaaatataacaattgtgagaattggatgtgaagaaagacctgaacatacacaaccaataagagacagaatgttgaacatcaagttagtatgtaagcttccaggagactttggtttggttgataaagaagaatggcctttaatatgtgcatggttagttaagcatggttatgaatcaaccatggctaactatacacatcattggggaaaagtaccagaatgggatgaaaactgggcggagcctaaaatacaaaaaggtataaattcaccaggttgcaaagacttagagacgcaagcggcaagcaatcctcagagtcaagaccaagttctaactcctctgactccggacgtagtggaccttgcactggaaccgtggagtactccagatacgcctattgcagaaactgcaaatcaacaatcaaaccaacttggcgttactcacaaagacgtgcaagcgagtccaacgtggtccgaaatagaggcagacctgagagccatctttacttctgaacaattggaagaagattttcgagacgacttggattaaggtacgatggcacctccggcaaagagagccaggagaggtaagggtgtgttaataaggtggggggaggggaaagatttgataacttaactaagtatgtgtttttttataggacttgtgcctccaggttataaatatcttgggcctgggaacagtcttgaccaaggagaaccaactaacccttctgacgccgctgcaaaagaacacgacgaagcttacgctgcttatcttcgctctggtaaaaacccatacttatatttctcgccagcagatcaacgctttatagatcaaactaaggacgctaaagattggggggggaaaataggacattatttttttagagctaaaaaggcaattgctccagtattaactgatacaccagatcatccatcaacatcaagaccaacaaaaccaactaaaagaagtagaccaccacctcatattttcatcaatcttgcaaaaaaaaaaaaagccggtgcaggacaagtaaaaagagacaatcttgcaccaatgagtgatggagcagttcaaccagacggtggtcagcctgctgtcagaaatgaaagagctacaggatctgggaacgggtctggaggcgggggtggtggtggttctgggggtgtggggatttctacgggtactttcaataatcagacggaatttaaatttttggaaaacggatgggtggaaatcacagcaaactcaagcagacttgtacatttaaatatgccagaaagtgaaaattatagaagagtggttgtaaataatttggataaaactgcagttaacggaaacatggctttagatgatacccatgcacaaattgtaacaccttggtcattggttgatgcaaatgcttggggagtttggtttaatccaggagattggcaactaattgttaatactatgagtgagttgcatttagttagttttgaacaagaaatttttaatgttgttttaaagactgtttcagaatctgctactcagccaccaactaaagtttataataatgatttaactgcatcattgatggttgcattagatagtaataatactatgccatttactccagcagctatgagatctgagacattgggtttttatccatggaaaccaaccataccaactccatggagatattattttcaatgggatagaacattaataccatctcatactggaactagtggcacaccaacaaatatataccatggtacagatccagatgatgttcaattttacactattgaaaattctgtgccagtacacttactaagaacaggtgatgaatttgctacaggaacattttattttgattgtaaaccatgtagactaacacacacatggcaaacaaatagagcattgggcttaccaccatttctaaattctttgcctcaagctgaaggaggtactaactttggttatataggagttcaacaagataaaagacgtggtgtaactcaaatgggaaatacaaacattattactgaagctactattatgagaccagctgaggttggttatagtgcaccatattattcttttgaggcgtctacacaagggccatttaaaacacctattgcagcaggacgggggggagcgcaaacagatgaaaatcaagcagcagatggtgatccaagatatgcatttggtagacaacatggtcaaaaaactaccacaacaggagaaacacctgagagatttacatatatagcacatcaagatacaggaagatatccagaaggagattggattcaaaatattaactttaaccttcctgtaacaaatgataatgtattgctaccaacagatccaattggaggtaaagcaggaattaactatactaatatatttaatacttatggtcctttaactgcattaaataatgtaccaccagtttatccaaatggtcaaatttgggataaagaatttgatactgacttaaaaccaagacttcatgtaaatgcaccatttgtttgtcaaaataattgtcctggtcaattatttgtaaaagttgcgcctaatttaacaaatgaatatgatcctgatgcatctgctaatatgtcaagaattgtaacttactcagatttttggtggaaaggtaaattagtatttaaagctaaactaagagcctctcatacttggaatccaattcaacaaatgagtattaatgtagataaccaatttaactatgtaccaagtaatattggaggtatgaaaattgtatatgaaaaatctcaactagcacctagaaaattatactaa

SEQ ID NO: 366 - DNA, 4269 bp, Canine parvovirus 2a UY621
  source 1..4269: mol_type = genomic DNA; note = Canine parvovirus 2a UY621 / Protoparvovirus carnivoran 1 - OK888589
atgtctggcaaccagtatactgaggaagttatggagggagtaaattggttaaagaaacatgcagaaaatgaagcattttcatttgtttttaaatgtgacaacgtccaactaaatggaaaggatgttcgctggaacaactataccaaaccaattcaaaatgaagagctaacatctttaattagaggagcacaaacagcaatggatcaaaccgaagaagaagaaatggactgggaatcggaagttgatagtctcgccaaaaagcaagtacaaacttttgatgcattaattaaaaaatgtctttttgaagtctttgtttctaaaaatatagaaccaaatgaatgcgtttggtttattcaacatgaatggggaaaagatcaaggctggcattgtcatgttttacttcatagtaagaacttacaacaagcaactggtaaatggctacgcagacaaatgaatatgtattggagtagatggttggtgactctttgttcagtaaacttaacaccaactgaaaaaattaaactcagagaaattgcagaagatagtgaatgggtgactatattaacatacagacataagcaaacaaaaaaagactatgttaaaatggttcattttggaaatatgatagcatattattttttaacaaagaaaaaaattgtccacatgacaaaagaaagtggctattttttaagtactgattctggttggaaatttaactttatgaagtatcaagacagacaaattgtcagcacactttacactgaacaaatgaaaccagaaaccgttgaaaccacagtgacgacagcacaggaaacaaagcgcgggagaattcaaactaaaaaggaagtgtcaatcaaatgtactttgcgggacttggttagtaaaagagtaacatcacctgaagactggatgatgttacaaccagatagttatattgaaatgatggcacaaccaggaggtgaaaatcttttaaaaaatacacttgaaatttgtactttgactttagcaagaacaaaaacagcatttgaattaatacttgaaaaagcagataatactaaactaactaactttgatcttgcaaattctagaacatgtcaaatttttagaatgcacggatggaattggattaaagtttgtcacgctatagcatgtgttttaaatagacaaggtggcaaaagaaatacagttctttttcatggaccagcaagtacaggaaaatctatcattgctcaagccatagcacaagctgtgggtaatgttggttgttataatgcagcaaatgtaaattttccatttaatgactgtaccaataaaaatttaatttggattgaagaagctggtaactttggtcaacaagttaatcaatttaaagcaatttgttctggacaaacaattagaattgatcaaaaaggtaaaggaagtaagcaaattgaaccaactccagtaattatgacaactaatgaaaatataacaattgtgagaattggatgtgaagaaagacctgaacatacacaaccaataagagacagaatgttgaacatcaagttagtatgtaagcttccaggagactttggtttggttgataaagaagaatggcctttaatatgtgcatggttagttaaacatggttatgaatcaaccatggctaactatacacatcattggggaaaagtaccagaatgggatgaaaactgggcggagcctaaaatacaaaaaggtataaattcaccaggttgcaaagacttagagacgcaagcggcaagcaatcctcagagtcaagaccaagttctaactcctctgactccggacgtagtggaccttgcactggaaccgtggagtactccagatacgcctattgcagaaactgcaaatcaacaatcaaaccaacttggcgttactcacaaagacgtgcaagcgagtccaacgtggtccgaaatagaggcagacctgagagccatctttacttctgaacaattggaagaagattttcgagacgacttggattaaggtacgatggcacctccggcaaagagagccaggagaggtaagggtgtgttaataaggtggggggaggggaaagatttgataacttaactaagtatgtgtttttttataggacttgtgcctccaggttataaatatcttgggcctgggaacagtcttgaccaaggagaaccaactaacccttctgacgccgctgcaaaagaacacgacgaagcttacgctgcttatcttcgctctggtaaaaacccatacttatatttctcgccagcagatcaacgctttatagatcaaactaaggacgctaaagattggggggggaaaataggacattatttttttagagctaaaaaggcaattgctccagtattaactgatacaccagatcatccatcaacatcaagaccaacaaaaccaactaaaagaagtagaccaccacctcatattttcatcaatcttgcaaaaaaaaaaaaagccggtgcaggacaagtaaaaagagacaatcttgcaccaatgagtgatggagcagttcaaccagacggtggtcagcctgctgtcagaaatgaaagagctacaggatctgggaacgggtctggaggcgggggtggtggtggttctgggggtgtggggatttctacgggtactttcaataatcagacggaatttaaatttttggaaaacggatgggtggaaatcacagcaaactcaagcagacttgtacatttaaatatgccagaaagtgaaaattatagaagagtggttgtaaataatttggataaaactgcagttaacggaaacatggctttagatgatacccatgcacaaattgtaacaccttggtcattggttgatgcaaatgcttggggagtttggtttaatccaggagattggcaactaattgttaatactatgagtgagttgcatttagttagttttgaacaagaaatttttaatgttgttttaaagactgtttcagaatctgctactcagccaccaactaaagtttataataatgatttaactgcatcattgatggttgcattagatagtaataatactatgccatttactccagcagctatgagatctgagacattgggtttttatccatggaaaccaaccataccaactccatggagatattattttcaatgggatagaacattaataccatctcatactggaactagtggcacaccaacaaatatataccatggtacagatccagatgatgttcaattttacactattgaaaattctgtgccagtacacttactaagaacaggtgatgaatttgctacaggaacattttattttgattgtaaaccatgtagactaacacacacatggcaaacaaatagagcattgggcttaccaccatttctaaattctttgcctcaagctgaaggaggtactaactttggttatataggagttcaacaagataaaagacgtggtgtaactcaaatgggaaatacaaacattattactgaagctactattatgagaccagctgaggttggttatagtgcaccatattattcttttgaggcgtctacacaagggccatttaaaacacctattgcagcaggacgggggggagcacaaacagatgaaaatcaagcagcagatggtgatccaagatatgcatttggtagacaacatggtcaaaaaactaccacaacaggagaaacacctgagagatttacatatatagcacatcaagatacaggaagatatccagaaggagattggattcaaaatattaactttaaccttcctgtaacaaatgataatgtattgctaccaacagatccaattggaggtaaagcaggaattaactatactaatatatttaatacttatggtcctttaactgcattaaataatgtaccaccagtttatccaaatggtcaaatttgggataaagaatttgatactgacttaaaaccaagacttcatgtaaatgcaccatttgtttgtcaaaataattgtcctggtcaattatttgtaaaagttgcgcctaatttaacaaatgaatatgatcctgatgcatctgctaatatgtcaagaattgtaacttactcagatttttggtggaaaggtaaattagtatttaaagctaaactaagagcctctcatacttggaatccaattcaacaaatgagtattaatgttgataaccaatttaactatgtaccaagtaatattggaggtatgaaaattgtatatgaaaaatctcaactagcacctagaaaattatactaa

SEQ ID NO: 367 - DNA, 1755 bp, Canine parvovirus 2
  source 1..1755: mol_type = genomic DNA; note = Canine parvovirus 2 / Protoparvovirus carnivoran 1 - OR037209
atgagtgatggagcagttcaaccagacggtggtcaacccgctgtcagaaatgaaagagctacaggatctgggaacgggtctggaggcgggggtggtggtggttctgggggtgtggggatttctacgggtacttttgataatcagacggaatttaaatttttggaaaacggatgggtggaaatcacagcaaactcaagcagacttgtgcatttaaatatgccagaaagtgaaaattatagaagagtggttgtaaataatttggataaaactgcagttaacggaaacatggctttagatgatactcatgcacaaattgtaacaccttggtcattggttgatgcaaatgcttggggagtttggtttaatccaggagattggcaactaattgttaatactatgagtgagttgcatttagttagttttgaacaagaaatttttaatgttgttttaaagactgtttcagaatctgctactcagccaccaactaaagtttataataatgatttaactgcatcattgatggttgcattagatagtaataatactatgccatttactccagcagctatgagatctgagacattgggtttttatccatggaaaccaaccataccaactccatggagatattattttcaatgggatagaacattaataccatctcatactggaactagtggcacaccaacaaatatataccatggtacagatccagatgatgttcaattttacactattgaaaattctgtgccagtacacttactaagaacaggtgatgaatttgctacaggaacattttattttgattgtaaaccatgtagactaacacatacatggcaaacaaatagagcattgggcttaccaccatttctaaattctttgcctcaagctgaaggaggtactaactttggttatataggagttcaacaagataaaagacgtggtgtaactcaaatgggaaacacaaacattattactgaagctactattatgagaccagctgaggttggttatagtgcaccatattattcttttgaggcgtctacacaagggccatttaaaacacctattgcagcaggacgggggggagcgcaaacagatgaaaatcgagcagcagatggtgatccaagatatgcatttggtagacaacatggtcaaaaaactaccacaacaggagaaacacctgagagatttacatatatagcacatcaagatacaggaagatatccagaaggagattggattcaaaatattaactttaaccttcctgtaacagaagataatgtattgctaccaacagatccaattggaggtaaaacaggaattaactatactaatatatttaatacttatggtcctttaactgcattaaataatgtaccaccagtttatccaaatggtcaaatttgggataaagaatttgatactgacttaaaaccaagacttcatgtaaatgcaccatttgtttgtcaaaataattgtcctggtcaattatttgtaaaagttgcacctaatttaacaaatgaatatgatcctgatgcatctgctaatatgtcaagaattgtaacttactcagattgttggtggaaaggtaaattagtatttaaagctaaactaagagcctctcatacttggaatccaattcaacaaatgagtatcattgtagataaccaatttaactatgtaccaagtaatattggaggtatgaaaattgtatatgaaaaatctcaactagcacctagaaaattatattaa

SEQ ID NO: 368 - DNA, 1755 bp, Canine parvovirus 2; identical to SEQ ID NO: 367
  source 1..1755: mol_type = genomic DNA; note = Canine parvovirus 2 / Protoparvovirus carnivoran 1 - OR051684

SEQ ID NO: 369 - DNA, 1755 bp, Canine parvovirus 2
  source 1..1755: mol_type = genomic DNA; note = Canine parvovirus 2 / Protoparvovirus carnivoran 1 - OR051685
atgagtgatggagcagttcaaccagacggtggtcaacccgctgtcagaaatgaaagagctacaggatctgggaacgggtctggaggcgggggtggtggtggttctgggggtgtggggatttctacgggtacttttgataatcagacggaatttaaatttttggaaaacggatgggtggaaatcacagcaaactcaagcagacttgtgcatttaaatatgccagaaagtgaaaattatagaagagtggttgtaaataatttggataaaactgcagttaacggaaacatggctttagatgatactcatgcacaaattgtaacaccttggtcattggttgatgcaaatgcttggggagtttggtttaatccaggagattggcaactaattgttaatactatgagtgagttgcatttagttagttttgaacaagaaatttttaatgttgttttaaagactgtttcagaatctgctactcagccaccaactaaagtttataataatgatttaactgcatcattgatggttgcattagatagtaataatactatgccatttactccagcagctatgagatctgagacattgggtttttatccatggaaaccaaccataccaactccatggagatattattttcaatgggatagaacattaataccatctcatactggaactagtggcacaccaacaaatatataccatggtacagatccagatgatgttcaattttacactattgaaaattctgtgccagtacacttactaagaacaggtgatgaatttgctacaggaacattttattttgattgtaaaccatgtagactaacacatacatggcaaacaaatagagcattgggcttaccaccatttctaaattctttgcctcaagctgaaggaggtactaactttggttatataggagttcaacaagataaaagacgtggtgtaactcaaatgggaaacacaaacattattactgaagctactattatgagaccagctgaggttggttatagtgcaccatattattcttttgaggcgtctacacaagggccatttaaaacacctattgcagcaggacgggggggagcgcaaacagatgaaaatcgagcagcagatggtgatccaagatatgcatttggtagacaacatggtcaaaaaactaccacaacaggagaaacacctgagagatttacatatatagcacatcaagatacaggaagatatccagaaggagattggattcaaaatattaactttaaccttcctgtaacagaagataatgtattgctaccaacagatccaattggaggtaaaacaggaattaactatactaatatatttaatacttatggtcctttaactgcattaaataatgtaccaccagtttatccaaatggtcaaatttgggataaagaatttgatactgacttaaaaccaagacttcatgtaaatgcaccatttgtttgtcaaaataattgtcctggtcaattatttgtaaaagttgcacctaatttaacaaatgaatatgatcctgatgcatctgctaatatgtcaagaattgtaacttactcagatttttggtggaaaggtaaattagtatttaaagctaaactaagagcctctcatacttggaatccaattcaacaaatgagtatcagtgtagataaccaatttaactatgtaccaagtaatattggaggtatgaaaattgtatatgaaaaatctcaactagcacctagaaaattatattaa

SEQ ID NO: 370 - DNA, 1755 bp, Canine parvovirus 2
  source 1..1755: mol_type = genomic DNA; note = Canine parvovirus 2 / Protoparvovirus carnivoran 1 - OR051686
atgagtgatggagcagttcaaccagacggtggtcaacctgctgtcagaaatgaaagagctacaggatctgggaacgggtctggaggcgggggtggtggtgtttctgggggtgtggggatttctacgggtacttttaataatcagacggaatttaaatttttggaaaacggatgggtggaaatcacagcaaactcaagcagacttgtgcatttaaatatgccagaaagtgaaaattatagaagagtggttgtaaataatttggataaaactgcagttaacggaaacatggctttagatgatactcatgcacaaattgtaacaccttggtcattggttgatgcaaatgcttggggagtttggtttaatccaggagattggcaactaattgttaatactatgagtgagttgcatttagttagttttgaacaagaaatttttaatgttgttttaaagactgtttcagaatttgctactcagccaccaactaaagtttataataatgatttaactgcatcattgatggttgcattagatagtaataatactatgccatttactccagcagctatgagatctgagacattgggtttttatccatggaaaccaaccataccaactccatggagatattattttcaatgggatagaacattaataccatctcatactggaactagtggcacaccaacaaatatataccatggtacagatccagatgatgttcaattttacactattgaaaattctgtgccagtacacttactaagaacaggtgatgaatttgctacaggaacattttattttgattgtaaaccatgtagactaacacatacatggcaaacaaatagagcattgggcttaccaccatttctaaattctttgcctcaagctgaaggaggtactaactttggttatataggagttcaacaagataaaagacgtggtgtaactcaaatgggaaacacaaacattattactgaagctactattatgagaccagctgaggttggttatagtgcaccatattattcttttgaggcgtctacacaagggccatttaaaacacctattgcagcaggacgggggggagcgcaaacagatgaaaatcgagcagcagatggtgatccaagatatgcatttggtagacaacatggtcaaaaaactaccacaacaggagaaacacctgagagatttacatatatagcacatcaagatacaggaagatatccagaaggagattggattcaaaatattaactttaaccttcctgtaacagaagataatgtattgctaccaacagatccaattggaggtaaaacaggaattaactatactaatatatttaatacttatggtcctttaactgcattaaataatgtaccaccagtttatccaaatggtcaaatttgggataaagaatttgatactgacttaaaaccaagacttcatgtaaatgcaccatttgtttgtcaaaataattgtcctggtcaattatttgtaaaagttgcacctaatttaacaaatgaatatgatcctgatgcatctgctaatatgtcaagaattgtaacttactcagattgttggtggaaaggtaaattagtatttaaagctaaactaagagcctctcatacttggaatccaattcaacaaatgagtatcattgtagataaccaatttaactatgtaccaagtaatattggaggtatgaaaattgtatatgaaaaatctcaactagcacctagaaaattatattaa

SEQ ID NO: 371 - DNA, 229 bp, Human parvovirus B19
  source 1..229: mol_type = genomic DNA; note = Human parvovirus B19 / Erythroparvovirus primate 1 - OR999319
aatgccagtggaaaggaggcaaaggtttgcaccattagtcccataatgggatactcaaccccatggagatatttagattttaatgctttaaatttatttttttcacctttagagtttcagcacttaattgaaaattatggaagtatagctcctgatgctttaactgtaaccatatcagaaattgctgttaaggatgttacagacaaaactggagggggggtacaggtta

SEQ ID NO: 372 - DNA, 122 bp, Human parvovirus 4
  source 1..122: mol_type = genomic DNA; note = Human parvovirus 4 / Tetraparvovirus primate 1 - OR999320
gacaagaataaccatgtttcagtttcagagaatggttccggatggcttagctccacttcctgaagaggaagtgagaagtttttttaagctcggtgaacaggaactgaatatgaaaggcacac

SEQ ID NO: 373 - DNA, 545 bp, Cutavirus
  source 1..545: mol_type = genomic DNA; note = Cutavirus / Protoparvovirus primate 3 - PP001440
gaaaagccagaggtaagtaaatctctcattcaacactaacaatgatgaatgaaaagcttctacaagctctaccttgcttacttggatttataataatgactttactcttctttatttttctcacaagctttctaagctcttactgcaattggaacaactgcatgaacctaaccaggcaaaacaaaaacttaaaaaaaagaacacaacaaactttaataatgggcttcctaccaacattactaagcttctcactagcactgctaatatgggccttatttatcttcctattctacttcaactacaactacaaattaaatatgatacaaatatctatcactgacactaactatacttttacaatccaaccactataggttgggtaccacctggatacaacttcttaggacccttcaatcaagacttcaacaaaaaaccaactaatccatcagacaacgctgcaaaacaacatgatttggaatacaacaaactaatcaaccaaggatacaacccatacttctactacaacaaagctgacgaagacttca

SEQ ID NO: 374 - DNA, 532 bp, Cutavirus
  source 1..532: mol_type = genomic DNA; note = Cutavirus / Protoparvovirus primate 3 - PP001441
gaaaagccagaggtaagtaaatctctcattcaacactaacaatgatgaatgaaaaatttctacaagctctaccttgcttaattggatttataatcatgactattctcttcttcttatttctactaagctttctaagttcctactgcaattggaacaacttcactaacataaccaaaccaaaaaaaaacttacaagcaaaatcaaaacaagctttaatattaggctttctaccaactttactaagcttctcactagcactgctaatatgggccttattcatcttcttattttacttcaactacaactacagactaactatgatacaaatacatatcaccaacactaactatacttttacaatccaaccactataggttgggtaccacctggatacaacttcctaggacccttcaatcaagacttcaacaaagaaccaactaatccatctgacaacgctgcaaaacaacacgatttggaatacaccaaactaatcaaccaaggacacaacccttattggtactacaacaaagcc

SEQ ID NO: 375 - DNA, 514 bp, Cutavirus
  source 1..514: mol_type = genomic DNA; note = Cutavirus / Protoparvovirus primate 3 - PP001442
gaaaagccagaggtaagtaaatctctcattcaacactaacaatgatgaatgaaaaatttctacaagctctaccttgcttaattggatttataatcatgactattctcttcttcttatttctactaagctttctaagttcctactgcaattggaacaacttcactaacataaccaaaccaaaaaaaaacttacaagcaaaatcaaaacaagctttaatattaggctttctaccaactttactaagcttctcactagcacccagaatatgggccttattcatcttcttattttacttcaactacaactacagactaactatgatacaaatacatatcaccaacactaactatacttttacaatccaaccactataggttgggtaccacctggatacaacttcctaggacccttcaatcaagacttcaacaaagaaccaactaatccatctgacaacgctgcaaaacaacacgatttggaatacaccaaactaatcaaccaaggacacaacccttat

SEQ ID NO: 376 - DNA, 532 bp, Cutavirus
  source 1..532: mol_type = genomic DNA; note = Cutavirus / Protoparvovirus primate 3 - PP001443
gaaaagccagaggtaagtaaatctctcattcaacactaacaatcatgaatgaaaaacttctacaagctctaccttgcttacttggatttataatcatgactattctcttcttcttatttctactaagctttctaagttcctactgcaattggaacaacttcactaacataaccaaaccaaaaaaaaacttaaaagcaaaatcaagacaaactttaatagtaggctttctaccaactttactaagcttctcagtagcactgctgatatgggccttattcatcttcttattytacttcaactacaactacaaactaactatgataraaatacatatcaccgacactaactatacttttacaatccaaccactataggttgggtaccacctggatacaacttcctaggacccttcaatcaagacttcaacaaagaaccaactaatccatctgacaacgctgcaaaacaacacgatttggaatacaccaaactaatcaaccaaggacacaacccttattggtactacaacaaagcc

SEQ ID NO: 377 - DNA, 514 bp, Cutavirus
  source 1..514: mol_type = genomic DNA; note = Cutavirus / Protoparvovirus primate 3 - PP001444
gaaaagccagaggtaagtaaatctctcattcaacactaacaatcatgaatgaaaaacttctacaagctctaccttgcttacttggatttataatcatgactattctcttcttcttatttctactaagctttctaagttcctactgcaattggaacaacttcactaacataaccaaaccaaaaaaaaacttaaaagcaaaatcaagacaaactttaatagtaggctttctaccaactttactaagcttctcagtagcactgctgatatgggccttattcatcttcttattttacttcaactacaactacaaactaactatgataaaaatacatatcaccgacactaactatacttttacaatccaaccactataggttgggtaccacctggatacaacttcctaggacccttcaatcaagacttcaacaaagaaccaactaatccatctgacaacgctgcaaaacaacacgatttggaatacaccaaactaatcaaccaaggacacaacccttat

SEQ ID NO: 378 - DNA, 548 bp, Cutavirus
  source 1..548: mol_type = genomic DNA; note = Cutavirus / Protoparvovirus primate 3 - PP001445
gaaaagccagaggtaagtaaatatttcattatacactacataatgcaaactacagaaaatctcctgagagctctaccttgcttacttggatttataatcatgactatcttattcttcttttttctcacaagctttctaagctcttactgcaactggaacaacttcactaacttaaccaaacacacaaaaaccttaaaaagcaaacaaaaacaaacattaataatgggcttcctaccaactttactaagcctaggactagctctactaatatgggccttatttatctggatgttttacttcaactacaactacaaactaactgcaatatatatacaaatgactaacacaaattttacttataccatccaaccactataggttgggtaccacctggatacaacttcctaggacccttcaatcaagacttcaacaaaaaaccaactaatccatctgacaacgctgcaaaacaacacgatttggaatacaacaaactaatcaaccaaggacacaacccttactggtactacaacaaagccgacgaagacttc

SEQ ID NO: 379 - DNA, 529 bp, Cutavirus
  source 1..529: mol_type = genomic DNA; note = Cutavirus / Protoparvovirus primate 3 - PP001446
gaaaagccagaggtaagtaaatctctcattcaacactaacaatgacaactgaaaaacttctacaagctctaccttgcttacttggatttataatcatgactattctcttcttcttctttctactaagctttctaagctcctactgcaattggaacaacttcactaacataaccaaaccaaaaaaaaacttacaagcaaaatcaaaacaarctttaatattaggctttctaccaactttactaagcttctcactagcactgctratatgggccttattcatcttcttattttacttcaactacaactacaaactaactatgatacaaatacatatcaccaacactaactatacttttacaatccaaccactataggttgggtaccacctggatacaacttcctaggacccttcaatcaagacttcaacaaagaaccaactaatccatctgacaacgctgcaaaacaacacgatttggaatacaacaaactaatcaaccaaggacacaacccttattggtactacaacaaa

SEQ ID NO: 380 - DNA, 1755 bp, Canine parvovirus
  source 1..1755: mol_type = genomic DNA; note = Canine parvovirus / Protoparvovirus carnivoran 1 - OR992670
atgagtgatggaggagttcaaccagacggtggtcaacctgctgtcagaaatgaaagagctacaggatctgggaacgggtctggaggcgggggtggtggtggttctgggggtgtggggatttctacgggtacttttaataatcagacggaatttaaatttttggaaaacggatgggtggaaatcacagcaaactcaagcagacttgtgcatttaaatatgccagaaagtgaaaattatagaagagtggttgtaaataatttggataaaactgcagttaacggaaacatggctttagatgatactcatgcacaaattgtaacaccttggtcattggttgatgcaaatgcttggggagtttggtttaatccaggagattggcaactaattgttaatactatgagtgagttgcatttagttagttttgaacaagaaatttttaatgttgttttaaagactgtttcagaatctgctactcagccaccaactaaagtttataataatgatttaactgcatcattgatggttgcattagatagtaataatactatgccatttactccagcagctatgagatctgagacattgggtttttatccatggaaaccaaccataccaactccatggagatattattttcaatgggatagaacattaataccatctcacactggaactagtggcacaccaacaaatatataccatggtacagatccagatgatgttcaattttacactattgaaaattctgtgccagtacacttactaagaacaggtgatgaatttgctacaggaacattttattttgattgtaaaccatgtagactaacacatacatggcaaacaaatagagcattgggcttaccaccatttctaaattctttgcctcaagctgaaggaggtactaactttggttatataggagttcaacaagataaaagacgtggtgtaactcaaatgggaaacacaaacattattactgaagctactattatgagaccagctgaggttggttatagtgcaccatattattcttttgaggcgtctacacaagggccatttaaaacacctattgcagcaggacgggggggagcgcaaacagatgaaaatcgagcagcagatggtgatccaagatatgcatttggtagacaacatggtcaaaaaactaccacaacaggagaaacacctgagagatttacatatatagcacatcaagatacaggaagatatccagaaggagattggattcaaaatattaactttaaccttcctgtaacagaagataatgtattgctaccaacagatccaattggaggtaaaacaggaattaactatactaatatatttaatacttatggtcctttaactgcattaaataatgtaccaccagtttatccaaatggtcaaatttgggataaagaatttgatactgacttaaaaccaagacttcatgtaaatgcaccatttgtttgtcaaaataattgtcctggtcaattatttgtaaaagttgcacctaatttaacaaatgaatatgatcctgatgcatctgctaatatgtcaagaattgtaacttactcagatttttggtggaaaggtaaattagtatttaaagctaaactaagagcctctcatacttggaatccaattcaacaaatgagtatcaatgtagataaccaatttaactatgtaccaagtaatattggaggtatgaaaattgtatatgaaaaatctcaactagcacctagaaaattatattaa

SEQ ID NO: 381 - DNA, 1755 bp, Canine parvovirus
  source 1..1755: mol_type = genomic DNA; note = Canine parvovirus / Protoparvovirus carnivoran 1 - OR992671
atgagtgatggaggagttcaaccagacggtggtcaacctgctgtcagaaatgaaagagctacaggatctgggaacgggtctggaggcgggggtggtggtggttctgggggtgtggggatttctacgggtacttttaataatcagacggaatttaaatttttggaaaacggatgggtggaaatcacagcaaactcaagcagacttgtgcatttaaatatgccagaaagtgaaaattatagaagagtggttgtaaataatttggataaaactgcagttaacggaaacatggctttagatgatactcatgcacaaattgtaacaccttggtcattggttgatgcaaatgcttggggagtttggtttaatccaggagattggcaactaattgttaatactatgagtgagttgcatttagttagttttgaacaagaaatttttaatgttgttttaaagactgtttcagaatctgctactcagccaccaactaaagtttataataatgatttaactgcatcattgatggttgcattagatagtaataatactatgccatttactccagcagctatgagatctgagacattgggtttttatccatggaaaccaaccataccaactccatggagatattattttcaatgggatagaacattaataccatctcatactggaactagtggcacaccaacaaatatataccatggtacagatccagatgatgttcaattttacactattgaaaattctgtgccagtacacttactaagaacaggtgatgaatttgctacaggaacattttattttgattgtaaaccatgtagactaacacatacatggcaaacaaatagagcattgggcttaccaccatttctaaattctttgcctcaagctgaaggaggtactaactttggttatataggagttcaacaagataaaagacgtggtgtaactcaaatgggaaacacaaacattattactgaagctactattatgagaccagctgaggttggttatagtgcaccatattattcttttgaggcgtctacacaagggccatttaaaacacctattgcagcaggacgggggggagcgcaaacagatgaaaatcgagcagcagatggtgatccaagatatgcatttggtagacaacatggtcaaaaaactaccacaacaggagaaacacctgagagatttacatatatagcacatcaagatacaggaagatatccagaaggagattggattcaaaatattaactttaaccttcctgtaacagaagataatgtattgctaccaacagatccaattggaggtaaaacaggaattaactatactaatatatttaatacttatggtcctttaactgcattaaataatgtaccaccagtttatccaaatggtcaaatttgggataaagaatttgatactgacttaaaaccaagacttcatgtaaatgcaccatttgtttgtcaaaataattgtcctggtcaattatttgtaaaagttgcacctaatttaacaaatgaatatgatcctgatgcatctgctaatatgtcaagaattgtaacttactcagatttttggtggaaaggtaaattagtatttaaagctaaactaagagcctctcatacttggaatccaattcaacaaatgagtatcaatgtagataaccaatttaactatgtaccaagtaatattggaggtatgaaaattgtatatgaaaaatctcaactagcacctagaaaattatattaa

SEQ ID NO: 382 - DNA, 1755 bp, Canine parvovirus; identical to SEQ ID NO: 381
  source 1..1755: mol_type = genomic DNA; note = Canine parvovirus / Protoparvovirus carnivoran 1 - OR992672

SEQ ID NO: 383 - DNA, 1755 bp, Canine parvovirus; identical to SEQ ID NO: 381
  source 1..1755: mol_type = genomic DNA; note = Canine parvovirus / Protoparvovirus carnivoran 1 - OR992673

SEQ ID NO: 384 - DNA, 1755 bp, Canine parvovirus
  source 1..1755: mol_type = genomic DNA; note = Canine parvovirus / Protoparvovirus carnivoran 1 - OR992674
atgagtgatggagcagttcaaccagacggtggtcagcctgctgtcagaaatgaaagagctacaggatctgggaacgggtctggaggcgggggtggtggtggttctgggggtgtggggatttctacgggtactttcaataatcagacggaatttaaatttttggaaaacggatgggtggaaatcacagcaaactcaagcagacttgtacatttaaatatgccagaaagtgaaaattatagaagagtggttgtaaataatttggataaaactgcagttaacggaaacatggctttagatgatacccatgcacaaattgtaacaccttggtcattggttgatgcaaatgcttggggagtttggtttaatccaggagattggcaactaattgttaatactatgagtgagttgcatttagttagttttgaacaagaaatttttaatgttgttttaaagactgtttcagaatctgctactcagccaccaactaaagtttataataatgatttaactgcatcattgatggttgcattagatagtaataatactatgccatttactccagcagctatgagatctgagacattgggtttttatccatggaaaccaaccataccaactccatggagatattattttcaatgggatagaacattaataccatctcatactggaactagtggcacaccaacaaatatataccatggtacagatccagatgatgttcaattttacactattgaaaattctgtgccagtacacttactaagaacaggtgatgaatttgctacaggaacattttattttgattgtaaaccatgtagactaacacacacatggcaaacaaatagagcattgggcttaccaccatttctaaattctttgcctcaagctgaaggaggtactaactttggttatataggagttcaacaagataaaagacgtggtgtaactcaaatgggaaatacaaacattattactgaagctactattatgagaccagctgaggttggttatagtgcaccatattattcttttgaggcgtctacacaagggccatttaaaacacctattgcagcaggacgggggggagcgcaaacagatgaaaatcaagcagcagatggtgatccaagatatgcatttggtagacaacatggtcaaaaaactaccacaacaggagaaacacctgagagatttacatatatagcacatcaagatacaggaagatatccagaaggagattggattcaaaatattaactttaaccttcctgtaacagatgataatgtattgctaccaacagatccaattggaggtaaagcaggaattaactatactaatatatttaatacttatggtcctttaactgcattaaataatgtaccaccagtttatccaaatggtcaaatttgggataaagaatttgatactgacttaaaaccaagacttcatgtaaatgcaccatttgtttgtcaaaataattgtcctggtcaattatttgtaaaagttgcgcctaatttaacaaatgaatatgatcctgatgcatctgctaatatgtcaagaattgtaacttactcagatttttggtggaaaggtaaattagtatttaaagctaaactaagagcctctcatacttggaatccaattcaacaaatgagtattaatgtagataaccaatttaactatgtaccaagtaatattggaggtatgaaaattgtatatgaaaaatctcaactagcacctagaaaattatattaa

SEQ ID NO: 385 - DNA, 1755 bp, Canine parvovirus
  source 1..1755: mol_type = genomic DNA; note = Canine parvovirus / Protoparvovirus carnivoran 1 - OR992675
atgagtgatggagcagttcaaccagacggtggtcagcctgctgtcagaaatgaaagagctacaggatctgggaacgggtctggaggcgggggtggtggtggttctgggggtgtggggatttctacgggtactttcaataatcagacggaatttaaatttttggaaaacggatgggtggaaatcacagcaaactcaagcagacttgtacatttaaatatgccagaaagtgaaaattatagaagagtggttgtaaataatttggataaaactgcagttaacggaaacatggctttagatgatacccatgcacaaattgtaacaccttggtcattggttgatgcaaatgcttggggagtttggtttaatccaggagattggcaactaattgttaatactatgagtgagttgcatttagttagttttgaacaagaaatttttaatgttgttttaaagactgtttcagaatctgctactcagccaccaactaaagtttataataatgatttaactgcatcattgatggttgcattagatagtaataatactatgccatttactccagcagctatgagatctgagacattgggtttttatccatggaaaccaaccataccaactccatggagatattattttcaatgggatagaacattaataccatctcatactggaactagtggcacaccaacaaacatataccatggtacagatccagatgatgttcaattttacactattgaaaattctgtgccagtacacttactaagaacaggtgatgaatttgctacaggaacattttattttgattgtaaaccatgtagactaacacacacatggcaaacaaatagagcattgggcttaccaccatttctaaattctttgcctcaagctgaaggaggtactaactttggttatataggagttcaacaagataaaagacgtggtgtaactcaaatgggaaatacaaacattattactgaagctactattatgagaccagctgaggttggttatagtgcaccatattattcttttgaggcgtctacacaagggccatttaaaacacctattgcagcaggacgggggggagcgcaaacagatgaaaatcaagcagcagatggtgatccaagatatgcatttggtagacaacatggtcaaaaaactaccacaacaggagaaacacctgagagatttacatatatagcacatcaagatacaggaagatatccagaaggagattggattcaaaatattaactttaaccttcctgtaacagatgataatgtattgctaccaacagatccaattggaggtaaagcaggaattaactatactaatatatttaatacttatggtcctttaactgcattaaataatgtaccaccagtttatccaaatggtcaaatttgggataaagaatttgatactgacttaaaaccaagacttcatgtaaatgcaccatttgtttgtcaaaataattgtcctggtcaattatttgtaaaagttgcgcctaatttaacaaatgaatatgatcctgatgcatctgctaatatgtcaagaattgtaacttactcagatttttggtggaaaggtaaattagtatttaaagctaaactaagagcctctcatacttggaatccaattcaacaaatgagtattaatgtagataaccaatttaactatgtaccaagtaatattggaggtatgaaaattgtatatgaaaaatctcaactagcacctagaaaattatactaa

SEQ ID NO: 386 - DNA, 1755 bp, Feline panleukopenia virus
  source 1..1755: mol_type = genomic DNA; note = Feline panleukopenia virus / Protoparvovirus carnivoran 1 - OP985508
atgagtgatggagcagttcaaccagacggtggtcaacctgctgtcagaaatgaaagagctacaggatctgggaacgggtctggaggcgggggtggtggtggttctgggggtgtggggatttctacgggtactttcaataatcagacggaatttaaatttttggaaaacggatgggtggaaatcacagcaaactcaagcagacttgtacatttaaatatgccagaaagtgaaaattataaaagagtagttgtaaataatatggataaaactgcagttaaaggaaacatggctttagatgatattcatgtacaaattgtaacaccttggtcattggttgatgcaaatgcttggggagtttggtttaatccaggagattggcaactaattgttaatactatgagtgagttgcatttagttagttttgaacaagaaatttttaatgttgttttaaagactgtttcagaatctgctactcagccaccaactaaagtttataataatgatttaactgcatcattgatggttgcattagatagtaataatactatgccatttactccagcagctatgagatctgagacattgggtttttatccatggaaaccaaccataccaactccatggagatattattttcagtgggatagaacattaataccatctcatactggaactagtggcacaccaacaaatgtatatcatggtacagatccagatgatgttcaattttatactattgaaaattctgtgccagtacacttactaagaacaggtgatgaatttgctacaggaacatttttttttgattgcaaaccatgtagactaacacatacatggcaaacaaatagagcattgggcttaccaccatttttaaattctttgcctcaatctgaaggagctactaactttggtgatataggagttcaacaagataaaagacgtggtgtaactcaaatgggaaatacagactatattactgaagctactattatgagaccagctgaggttggttatagtgcaccatattattcttttgaagcgtctacacaagggccatttaaaacacctattgcagcaggacgggggggagcacaaacagatgaaaatcaagcagcagatggtgatccaagatatgcatttggtagacaacatggtcaaaaaactactacaacaggagaaacacctgagagatttacatatatagcacatcaagatacaggaagatatccagaaggagattggattcaaaatattaactttaaccttcctgtaacaaatgataatgtattgctaccaacagatccaattggaggtaaaacaggaattaactatactaatatatttaatacttatggtcctttaactgcattaaataatgtaccaccagtttatccaaatggtcaaatttgggataaagaatttgatactgacttaaaaccaagacttcatgtaaatgcaccatttgtttgtcaaaataattgtcctggtcaattatttgtaaaagttgcgcctaatttaacaaatgaatatgatcctgatgcatctgctaatatgtcaagaattgtaacttattcagatttttggtggaaaggtaaattagtatttaaagctaaactaagagcatctcatacttggaatccaattcaacaaatgagtattaatgtagataaccaatttaactatgtaccaaataatattggagctatgaaaattgtatatgaaaaatctcaactagcacctagaaaattatattaa

SEQ ID NO: 387 - DNA, 1755 bp, Feline panleukopenia virus; identical to SEQ ID NO: 386
  source 1..1755: mol_type = genomic DNA; note = Feline panleukopenia virus / Protoparvovirus carnivoran 1 - OP985509

SEQ ID NO: 388 - DNA, 47 bp, Homo sapiens
  source 1..47: mol_type = genomic DNA; note = 5 UTR
gggaaataagagagaaaagaagagtaagaagaaatataagagccacc

SEQ ID NO: 389 - DNA, 47 bp, Homo sapiens
  source 1..47: mol_type = genomic DNA; note = 5 UTR
gggagatcagagagaaaagaagagtaagaagaaatataagagccacc

SEQ ID NO: 390 - DNA, 145 bp, Homo sapiens
  source 1..145: mol_type = genomic DNA; note = 5 UTR
ggaataaaagtctcaacacaacatatacaaaacaaacgaatctcaagcaatcaagcattctacttctattgcagcaatttaaatcatttcttttaaagcaaaagcaattttctgaaaattttcaccatttacgaacgatagcaac

SEQ ID NO: 391 - RNA, 42 nt, Homo sapiens
  source 1..42: mol_type = genomic RNA; note = 5 UTR
gggagacaagcttggcattccggtactgttggtaaagccacc

SEQ ID NO: 392 - DNA, 47 bp, Homo sapiens; identical to SEQ ID NO: 389
  source 1..47: mol_type = genomic DNA; note = 5 UTR

SEQ ID NO: 393 - DNA, 145 bp, Homo sapiens; identical to SEQ ID NO: 390
  source 1..145: mol_type = genomic DNA; note = 5 UTR

SEQ ID NO: 394 - RNA, 42 nt, Homo sapiens; identical to SEQ ID NO: 391
  source 1..42: mol_type = genomic RNA; note = 5 UTR

SEQ ID NO: 395 - DNA, 47 bp, Homo sapiens
  source 1..47: mol_type = genomic DNA; note = 5 UTR
gggaattaacagagaaaagaagagtaagaagaaatataagagccacc

SEQ ID NO: 396 - DNA, 47 bp, Homo sapiens
  source 1..47: mol_type = genomic DNA; note = 5 UTR
gggaaattagacagaaaagaagagtaagaagaaatataagagccacc

SEQ ID NO: 397 - DNA, 47 bp, Homo sapiens
  source 1..47: mol_type = genomic DNA; note = 5 UTR
gggaaataagagagtaaagaacagtaagaagaaatataagagccacc

SEQ ID NO: 398 - DNA, 47 bp, Homo sapiens
  source 1..47: mol_type = genomic DNA; note = 5 UTR
gggaaaaaagagagaaaagaagactaagaagaaatataagagccacc

SEQ ID NO: 399 - DNA, 47 bp, Homo sapiens
  source 1..47: mol_type = genomic DNA; note = 5 UTR
gggaaataagagagaaaagaagagtaagaagatatataagagccacc

SEQ ID NO: 400 - DNA, 47 bp, Homo sapiens
  source 1..47: mol_type = genomic DNA; note = 5 UTR
gggaaataagagacaaaacaagagtaagaagaaatataagagccacc

SEQ ID NO: 401 - DNA, 47 bp, Homo sapiens
  source 1..47: mol_type = genomic DNA; note = 5 UTR
gggaaattagagagtaaagaacagtaagtagaattaaaagagccacc

SEQ ID NO: 402 - DNA, 47 bp, Homo sapiens
  source 1..47: mol_type = genomic DNA; note = 5 UTR
gggaaataagagagaatagaagagtaagaagaaatataagagccacc

SEQ ID NO: 403 - DNA, 47 bp, Homo sapiens
  source 1..47: mol_type = genomic DNA; note = 5 UTR
gggaaataagagagaaaagaagagtaagaagaaaattaagagccacc

SEQ ID NO: 404 - DNA, 47 bp, Homo sapiens
  source 1..47: mol_type = genomic DNA; note = 5 UTR
gggaaataagagagaaaagaagagtaagaagaaatttaagagccacc

SEQ ID NO: 405 - DNA, 92 bp, Homo sapiens
  source 1..92: mol_type = genomic DNA; note = 5 UTR
tcaagcttttggaccctcgtacagaagctaatacgactcactatagggaaataagagagaaaagaagagtaagaagaaatataagagccacc

SEQ ID NO: 406 - DNA, 371 bp, Homo sapiens
  source 1..371: mol_type = genomic DNA; note = Creatine Kinase 3 UTR
gcgcctgcccacctgccaccgactgctggaacccagccagtgggagggcctggcccaccagagtcctgctccctcactcctcgccccgccccctgtcccagagtcccacctgggggctctctccacccttctcagagttccagtttcaaccagagttccaaccaatgggctccatcctctggattctggccaatgaaatatctccctggcagggtcctcttcttttcccagagctccaccccaaccaggagctctagttaatggagagctcccagcacactcggagcttgtgctttgtctccacgcaaagcgataaataaaagcattggtggcctttggtctttgaataaagcctgagtaggaagtctaga

SEQ ID NO: 407 - DNA, 568 bp, Homo sapiens
  source 1..568: mol_type = genomic DNA; note = Myoglobin 3 UTR
gcccctgccgctcccacccccacccatctgggccccgggttcaagagagagcggggtctgatctcgtgtagccatatagagtttgcttctgagtgtctgctttgtttagtagaggtgggcaggaggagctgaggggctggggctggggtgttgaagttggctttgcatgcccagcgatgcgcctccctgtgggatgtcatcaccctgggaaccgggagtggcccttggctcactgtgttctgcatggtttggatctgaattaattgtcctttcttctaaatcccaaccgaacttcttccaacctccaaactggctgtaaccccaaatccaagccattaactacacctgacagtagcaattgtctgattaatcactggccccttgaagacagcagaatgtccctttgcaatgaggaggagatctgggctgggcgggccagctggggaagcatttgactatctggaacttgtgtgtgcctcctcaggtatggcagtgactcacctggttttaataaaacaacctgcaacatctcatggtctttgaataaagcctgagtaggaagtctaga

SEQ ID NO: 408 - DNA, 289 bp, Homo sapiens
  source 1..289: mol_type = genomic DNA; note = alpha-actin 3 UTR
acacactccacctccagcacgcgacttctcaggacgacgaatcttctcaatgggggggcggctgagctccagccaccccgcagtcactttctttgtaacaacttccgttgctgccatcgtaaactgacacagtgtttataacgtgtacatacattaacttattacctcattttgttatttttcgaaacaaagccctgtggaagaaaatggaaaacttgaagaagcattaaagtcattctgttaagctgcgtaaatggtctttgaataaagcctgagtaggaagtctaga

SEQ ID NO: 409 - DNA, 379 bp, Homo sapiens
  source 1..379: mol_type = genomic DNA; note = Albumin 3 UTR
catcacatttaaaagcatctcagcctaccatgagaataagagaaagaaaatgaagatcaaaagcttattcatctgtttttctttttcgttggtgtaaagccaacaccctgtctaaaaaacataaatttctttaatcattttgcctcttttctctgtgcttcaattaataaaaaatggaaagaatctaatagagtggtacagcactgttatttttcaaagatgtgttgctatcctgaaaattctgtaggttctgtggaagttccagtgttctctcttattccacttcggtagaggatttctagtttcttgtgggctaattaaataaatcattaatactcttctaatggtctttgaataaagcctgagtaggaagtctaga

SEQ ID NO: 410 - DNA, 118 bp, Homo sapiens
  source 1..118: mol_type = genomic DNA; note = alpha-globin 3 UTR
gctgccttctgcggggcttgccttctggccatgcccttcttctctcccttgcacctgtacctcttggtctttgaataaagcctgagtaggaaggcggccgctcgagcatgcatctaga

SEQ ID NO: 411 - DNA, 908 bp, Homo sapiens
  source 1..908: mol_type = genomic DNA; note = G-CSF 3 UTR
gccaagccctccccatcccatgtatttatctctatttaatatttatgtctatttaagcctcatatttaaagacagggaagagcagaacggagccccaggcctctgtgtccttccctgcatttctgagtttcattctcctgcctgtagcagtgagaaaaagctcctgtcctcccatcccctggactgggaggtagataggtaaataccaagtatttattactatgactgctccccagccctggctctgcaatgggcactgggatgagccgctgtgagcccctggtcctgagggtccccacctgggacccttgagagtatcaggtctcccacgtgggagacaagaaatccctgtttaatatttaaacagcagtgttccccatctgggtccttgcacccctcactctggcctcagccgactgcacagcggcccctgcatccccttggctgtgaggcccctggacaagcagaggtggccagagctgggaggcatggccctggggtcccacgaatttgctggggaatctcgtttttcttcttaagacttttgggacatggtttgactcccgaacatcaccgacgcgtctcctgtttttctgggtggcctcgggacacctgccctgcccccacgagggtcaggactgtgactctttttagggccaggcaggtgcctggacatttgccttgctggacggggactggggatgtgggagggagcagacaggaggaatcatgtcaggcctgtgtgtgaaaggaagctccactgtcaccctccacctcttcaccccccactcaccagtgtcccctccactgtcacattgtaactgaacttcaggataataaagtgtttgcctccatggtctttgaataaagcctgagtaggaaggcggccgctcgagcatgcatctaga

SEQ ID NO: 412 - DNA, 835 bp, Homo sapiens
  source 1..835: mol_type = genomic DNA; note = Col1a2; collagen, type I, alpha 2 3 UTR
actcaatctaaattaaaaaagaaagaaatttgaaaaaactttctctttgccatttcttcttcttcttttttaactgaaagctgaatccttccatttcttctgcacatctacttgcttaaattgtgggcaaaagagaaaaagaaggattgatcagagcattgtgcaatacagtttcattaactccttcccccgctcccccaaaaatttgaatttttttttcaacactcttacacctgttatggaaaatgtcaacctttgtaagaaaaccaaaataaaaattgaaaaataaaaaccataaacatttgcaccacttgtggcttttgaatatcttccacagagggaagtttaaaacccaaacttccaaaggtttaaactacctcaaaacactttcccatgagtgtgatccacattgttaggtgctgacctagacagagatgaactgaggtccttgttttgttttgttcataatacaaaggtgctaattaatagtatttcagatacttgaagaatgttgatggtgctagaagaatttgagaagaaatactcctgtattgagttgtatcgtgtggtgtattttttaaaaaatttgatttagcattcatattttccatcttattcccaattaaaagtatgcagattatttgcccaaatcttcttcagattcagcatttgttctttgccagtctcattttcatcttcttccatggttccacagaagctttgtttcttgggcaagcagaaaaattaaattgtacctattttgtatatgtgagatgtttaaataaattgtgaaaaaaatgaaataaagcatgtttggttttccaaaagaacatat

SEQ ID NO: 413 - DNA, 297 bp, Homo sapiens
  source 1..297: mol_type = genomic DNA; note = Col6a2; collagen, type VI, alpha 2 3 UTR
cgccgccgcccgggccccgcagtcgagggtcgtgagcccaccccgtccatggtgctaagcgggcccgggtcccacacggccagcaccgctgctcactcggacgacgccctgggcctgcacctctccagctcctcccacggggtccccgtagccccggcccccgcccagccccaggtctccccaggccctccgcaggctgcccggcctccctccccctgcagccatcccaaggctcctgacctacctggcccctgagctctggagcaagccctgacccaataaaggctttgaacccat

SEQ ID NO: 414 - DNA, 602 bp, Homo sapiens
  source 1..602: mol_type = genomic DNA; note = RPN1; ribophorin I 3 UTR
ggggctagagccctctccgcacagcgtggagacggggcaaggaggggggttattaggattggtggttttgttttgctttgtttaaagccgtgggaaaatggcacaactttacctctgtgggagatgcaacactgagagccaaggggtgggagttgggataatttttatataaaagaagtttttccactttgaattgctaaaagtggcatttttcctatgtgcagtcactcctctcatttctaaaatagggacgtggccaggcacggtggctcatgcctgtaatcccagcactttgggaggccgaggcaggcggctcacgaggtcaggagatcgagactatcctggctaacacggtaaaaccctgtctctactaaaagtacaaaaaattagctgggcgtggtggtgggcacctgtagtcccagctactcgggaggctgaggcaggagaaaggcatgaatccaagaggcagagcttgcagtgagctgagatcacgccattgcactccagcctgggcaacagtgttaagactctgtctcaaatataaataaataaataaataaataaataaataaataaaaataaagcgagatgttgccctcaaa

SEQ ID NO: 415 - DNA, 785 bp, Homo sapiens
  source 1..785: mol_type = genomic DNA; note = LRP1; low density lipoprotein receptor-related protein 1 3 UTR
ggccctgccccgtcggactgcccccagaaagcctcctgccccctgccagtgaagtccttcagtgagcccctccccagccagcccttccctggccccgccggatgtataaatgtaaaaatgaaggaattacattttatatgtgagcgagcaagccggcaagcgagcacagtattatttctccatcccctccctgcctgctccttggcacccccatgctgccttcagggagacaggcagggagggcttggggctgcacctcctaccctcccaccagaacgcaccccactgggagagctggtggtgcagccttcccctccctgtataagacactttgccaaggctctcccctctcgccccatccctgcttgcccgctcccacagcttcctgagggctaattctgggaagggagagttctttgctgcccctgtctggaagacgtggctctgggtgaggtaggcgggaaaggatggagtgttttagttcttgggggaggccaccccaaaccccagccccaactccaggggcacctatgagatggccatgctcaacccccctcccagacaggccctccctgtctccagggcccccaccgaggttcccagggctggagacttcctctggtaaacattcctccagcctcccctcccctggggacgccaaggaggtgggccacacccaggaagggaaagcgggcagccccgttttggggacgtgaacgttttaataatttttgctgaattcctttacaactaaataacacagatattgttataaataaaattgt

SEQ ID NO: 416 - DNA, 3001 bp, Homo sapiens
  source 1..3001: mol_type = genomic DNA; note = Nnt1; cardiotrophin-like cytokine factor 1 3 UTR
atattaaggatcaagctgttagctaataatgccacctctgcagttttgggaacaggcaaataaagtatcagtatacatggtgatgtacatctgtagcaaagctcttggagaaaatgaagactgaagaaagcaaagcaaaaactgtatagagagatttttcaaaagcagtaatccctcaattttaaaaaaggattgaaaattctaaatgtctttctgtgcatattttttgtgttaggaatcaaaagtattttataaaaggagaaagaacagcctcattttagatgtagtcctgttggattttttatgcctcctcagtaaccagaaatgttttaaaaaactaagtgtttaggatttcaagacaacattatacatggctctgaaatatctgacacaatgtaaacattgcaggcacctgcattttatgttttttttttcaacaaatgtgactaatttgaaacttttatgaacttctgagctgtccccttgcaattcaaccgcagtttgaattaatcatatcaaatcagttttaattttttaaattgtacttcagagtctatatttcaagggcacattttctcactactattttaatacattaaaggactaaataatctttcagagatgctggaaacaaatcatttgctttatatgtttcattagaataccaatgaaacatacaacttgaaaattagtaatagtatttttgaagatcccatttctaattggagatctctttaatttcgatcaacttataatgtgtagtactatattaagtgcacttgagtggaattcaacatttgactaataaaatgagttcatcatgttggcaagtgatgtggcaattatctctggtgacaaaagagtaaaatcaaatatttctgcctgttacaaatatcaaggaagacctgctactatgaaatagatgacattaatctgtcttcactgtttataatacggatggattttttttcaaatcagtgtgtgttttgaggtcttatgtaattgatgacatttgagagaaatggtggctttttttagctacctctttgttcatttaagcaccagtaaagatcatgtctttttatagaagtgtagattttctttgtgactttgctatcgtgcctaaagctctaaatataggtgaatgtgtgatgaatactcagattatttgtctctctatataattagtttggtactaagtttctcaaaaaattattaacacatgaaagacaatctctaaaccagaaaaagaagtagtacaaattttgttactgtaatgctcgcgtttagtgagtttaaaacacacagtatcttttggttttataatcagtttctattttgctgtgcctgagattaagatctgtgtatgtgtgtgtgtgtgtgtgtgcgtttgtgtgttaaagcagaaaagacttttttaaaagttttaagtgataaatgcaatttgttaattgatcttagatcactagtaaactcagggctgaattataccatgtatattctattagaagaaagtaaacaccatctttattcctgccctttttcttctctcaaagtagttgtagttatatctagaaagaagcaattttgatttcttgaaaaggtagttcctgcactcagtttaaactaaaaataatcatacttggattttatttatttttgtcatagtaaaaattttaatttatatatatttttatttagtattatcttattctttgctatttgccaatcctttgtcatcaattgtgttaaatgaattgaaaattcatgccctgttcattttattttactttattggttaggatatttaaaggatttttgtatatataatttcttaaattaatattccaaaaggttagtggacttagattataaattatggcaaaaatctaaaaacaacaaaaatgatttttatacattctatttcattattcctctttttccaataagtcatacaattggtagatatgacttattttatttttgtattattcactatatctttatgatatttaagtataaataattaaaaaaatttattgtaccttatagtctgtcaccaaaaaaaaaaaattatctgtaggtagtgaaatgctaatgttgatttgtctttaagggcttgttaactatcctttattttctcatttgtcttaaattaggagtttgtgtttaaattactcatctaagcaaaaaatgtatataaatcccattactgggtatatacccaaaggattataaatcatgctgctataaagacacatgcacacgtatgtttattgcagcactattcacaatagcaaagacttggaaccaacccaaatgtccatcaatgatagacttgattaagaaaatgtgcacatatacaccatggaatactatgcagccataaaaaaggatgagttcatgtcctttgtagggacatggataaagctggaaaccatcattctgagcaaactattgcaaggacagaaaaccaaacactgcatgttctcactcataggtgggaattgaacaatgagaacacttggacacaaggtggggaacaccacacaccagggcctgtcatggggtggggggagtggggagggatagcattaggagatatacctaatgtaaatgatgagttaatgggtgcagcacaccaacatggcacatgtatacatatgtagcaaacctgcacgttgtgcacatgtaccctagaacttaaagtataattaaaaaaaaaaagaaaacagaagctatttataaagaagttatttgctgaaataaatgtgatctttcccattaaaaaaataaagaaattttggggtaaaaaaacacaatatattgtattcttgaaaaattctaagagagtggatgtgaagtgttctcaccacaaaagtgataactaattgaggtaatgcacatattaattagaaagattttgtcattccacaatgtatatatacttaaaaatatgttatacacaataaatacatacattaaaaaataagtaaatgta

SEQ ID NO: 417 - DNA, 1037 bp, Homo sapiens
  source 1..1037: mol_type = genomic DNA; note = Col6a1; collagen, type VI, alpha 1 3 UTR
cccaccctgcacgccggcaccaaaccctgtcctcccacccctccccactcatcactaaacagagtaaaatgtgatgcgaattttcccgaccaacctgattcgctagattttttttaaggaaaagcttggaaagccaggacacaacgctgctgcctgctttgtgcagggtcctccggggctcagccctgagttggcatcacctgcgcagggccctctggggctcagccctgagctagtgtcacctgcacagggccctctgaggctcagccctgagctggcgtcacctgtgcagggccctctggggctcagccctgagctggcctcacctgggttccccaccccgggctctcctgccctgccctcctgcccgccctccctcctgcctgcgcagctccttccctaggcacctctgtgctgcatcccaccagcctgagcaagacgccctctcggggcctgtgccgcactagcctccctctcctctgtccccatagctggtttttcccaccaatcctcacctaacagttactttacaattaaactcaaagcaagctcttctcctcagcttggggcagccattggcctctgtctcgttttgggaaaccaaggtcaggaggccgttgcagacataaatctcggcgactcggccccgtctcctgagggtcctgctggtgaccggcctggaccttggccctacagccctggaggccgctgctgaccagcactgaccccgacctcagagagtactcgcaggggcgctggctgcactcaagaccctcgagattaacggtgctaaccccgtctgctcctccctcccgcagagactggggcctggactggacatgagagccccttggtgccacagagggctgtgtcttactagaaacaacgcaaacctctccttcctcagaatagtgatgtgttcgacgttttatcaaaggccccctttctatgttcatgttagttttgctccttctgtgtttttttctgaaccatatccatgttgctgacttttccaaataaaggttttcactcctctc

SEQ ID NO: 418 - DNA, 577 bp, Homo sapiens
  source 1..577: mol_type = genomic DNA; note = Calr; calreticulin 3 UTR
agaggcctgcctccagggctggactgaggcctgagcgctcctgccgcagagctggccgcgccaaataatgtctctgtgagactcgagaactttcatttttttccaggctggttcggatttggggtggattttggttttgttcccctcctccactctcccccaccccctccccgcccttttttttttttttttttaaactggtattttatctttgattctccttcagccctcacccctggttctcatctttcttgatcaacatcttttcttgcctctgtccccttctctcatctcttagctcccctccaacctggggggcagtggtgtggagaagccacaggcctgagatttcatctgctctccttcctggagcccagaggagggcagcagaagggggtggtgtctccaaccccccagcactgaggaagaacggggctcttctcatttcacccctccctttctcccctgcccccaggactgggccacttctgggtggggcagtgggtcccagattggctcacactgagaatgtaagaactacaaacaaaatttctattaaattaaattttgtgtctcc

SEQ ID NO: 419 - DNA, 2212 bp, Homo sapiens
  source 1..2212: mol_type = genomic DNA; note = Calr; calreticulin 3 UTR
ctccctccatcccaacctggctccctcccacccaaccaactttccccccaacccggaaacagacaagcaacccaaactgaaccccctcaaaagccaaaaaatgggagacaatttcacatggactttggaaaatatttttttcctttgcattcatctctcaaacttagtttttatctttgaccaaccgaacatgaccaaaaaccaaaagtgcattcaaccttaccaaaaaaaaaaaaaaaaaaagaataaataaataactttttaaaaaaggaagcttggtccacttgcttgaagacccatgcgggggtaagtccctttctgcccgttgggcttatgaaaccccaatgctgccctttctgctcctttctccacaccccccttggggcctcccctccactccttcccaaatctgtctccccagaagacacaggaaacaatgtattgtctgcccagcaatcaaaggcaatgctcaaacacccaagtggcccccaccctcagcccgctcctgcccgcccagcacccccaggccctgggggacctggggttctcagactgccaaagaagccttgccatctggcgctcccatggctcttgcaacatctccccttcgtttttgagggggtcatgccgggggagccaccagcccctcactgggttcggaggagagtcaggaagggccacgacaaagcagaaacatcggatttggggaacgcgtgtcaatcccttgtgccgcagggctgggcgggagagactgttctgttccttgtgtaactgtgttgctgaaagactacctcgttcttgtcttgatgtgtcaccggggcaactgcctgggggcggggatgggggcagggtggaagcggctccccattttataccaaaggtgctacatctatgtgatgggtggggtggggagggaatcactggtgctatagaaattgagatgcccccccaggccagcaaatgttcctttttgttcaaagtctatttttattccttgatatttttctttttttttttttttttttgtggatggggacttgtgaatttttctaaaggtgctatttaacatgggaggagagcgtgtgcggctccagcccagcccgctgctcactttccaccctctctccacctgcctctggcttctcaggcctctgctctccgacctctctcctctgaaaccctcctccacagctgcagcccatcctcccggctccctcctagtctgtcctgcgtcctctgtccccgggtttcagagacaacttcccaaagcacaaagcagtttttccccctaggggtgggaggaagcaaaagactctgtacctattttgtatgtgtataataatttgagatgtttttaattattttgattgctggaataaagcatgtggaaatgacccaaacataatccgcagtggcctcctaatttccttctttggagttgggggaggggtagacatggggaaggggctttggggtgatgggcttgccttccattcctgccctttccctccccactattctcttctagatccctccataaccccactcccctttctctcacccttcttataccgcaaacctttctacttcctctttcattttctattcttgcaatttccttgcaccttttccaaatcctcttctcccctgcaataccatacaggcaatccacgtgcacaacacacacacacactcttcacatctggggttgtccaaacctcatacccactccccttcaagcccatccactctccaccccctggatgccctgcacttggtggcggtgggatgctcatggatactgggagggtgaggggagtggaacccgtgaggaggacctgggggcctctccttgaactgacatgaagggtcatctggcctctgctcccttctcacccacgctgacctcctgccgaaggagcaacgcaacaggagaggggtctgctgagcctggcgagggtctgggagggaccaggaggaaggcgtgctccctgctcgctgtcctggccctgggggagtgagggagacagacacctgggagagctgtggggaaggcactcgcaccgtgctcttgggaaggaaggagacctggccctgctcaccacggactgggtgcctcgacctcctgaatccccagaacacaacccccctgggctggggtggtctggggaaccatcgtgcccccgcctcccgcctactcctttttaagctt

SEQ ID NO: 420 - DNA, 729 bp, Homo sapiens
  source 1..729: mol_type = genomic DNA; note = Col1a1; collagen, type I, alpha 1 3 UTR
ttggccaggcctgaccctcttggacctttcttctttgccgacaaccactgcccagcagcctctgggacctcggggtcccagggaacccagtccagcctcctggctgttgacttcccattgctcttggagccaccaatcaaagagattcaaagagattcctgcaggccagaggcggaacacacctttatggctggggctctccgtggtgttctggacccagcccctggagacaccattcacttttactgctttgtagtgactcgtgctctccaacctgtcttcctgaaaaaccaaggcccccttcccccacctcttccatggggtgagacttgagcagaacaggggcttccccaagttgcccagaaagactgtctgggtgagaagccatggccagagcttctcccaggcacaggtgttgcaccagggacttctgcttcaagttttggggtaaagacacctggatcagactccaagggctgccctgagtctgggacttctgcctccatggctggtcatgagagcaaaccgtagtcccctggagacagcgactccagagaacctcttgggagacagaagaggcatctgtgcacagctcgatcttctacttgcctgtggggaggggagtgacaggtccacacaccacactgggtcaccctgtcctggatgcctctgaagagagggacagaccgtcagaaactggagagtttctattaaaggtcatttaaacca

SEQ ID NO: 421 - DNA, 847 bp, Homo sapiens
  source 1..847: mol_type = genomic DNA; note = Nucb1; nucleobindin 1 3 UTR
tcctccgggaccccagccctcaggattcctgatgctccaaggcgactgatgggcgctggatgaagtggcacagtcagcttccctgggggctggtgtcatgttgggctcctggggcgggggcacggcctggcatttcacgcattgctgccaccccaggtccacctgtctccactttcacagcctccaagtctgtggctcttcccttctgtcctccgaggggcttgccttctctcgtgtccagtgaggtgctcagtgatcggcttaacttagagaagcccgccccctccccttctccgtctgtcccaagagggtctgctctgagcctgcgttcctaggtggctcggcctcagctgcctgggttgtggccgccctagcatcctgtatgcccacagctactggaatccccgctgctgctccgggccaagcttctggttgattaatgagggcatggggtggtccctcaagaccttcccctaccttttgtggaaccagtgatgcctcaaagacagtgtcccctccacagctgggtgccaggggcaggggatcctcagtatagccggtgaaccctgataccaggagcctgggcctccctgaacccctggcttccagccatctcatcgccagcctcctcctggacctcttggcccccagccccttccccacacagccccagaagggtcccagagctgaccccactccaggacctaggcccagcccctcagcctcatctggagcccctgaagaccagtcccacccacctttctggcctcatctgacactgctccgcatcctgctgtgtgtcctgttccatgttccggttccatccaaatacactttctggaacaaa

SEQ ID NO: 422 - DNA, 110 bp, Homo sapiens
  source 1..110: mol_type = genomic DNA; note = alpha-globin (short) 3 UTR
gctggagcctcggtggccatgcttcttgccccttgggcctccccccagcccctcctccccttcctgcacccgtacccccgtggtctttgaataaagtctgagtgggcggc

SEQ ID NO: 423 - DNA, 119 bp, Homo sapiens
  source 1..119: mol_type = genomic DNA; note = alpha-globin (long) 3 UTR
tgataataggctggagcctcggtggccatgcttcttgccccttgggcctccccccagcccctcctccccttcctgcacccgtacccccgtggtctttgaataaagtctgagtgggcggc

SEQ ID NO: 424 - protein, 750 aa, Homo sapiens [sequence omitted]

SEQ ID NO: 425 - DNA, 2250 bp, Homo sapiens
  source 1..2250: mol_type = genomic DNA; note = methylmalonyl Coenzyme A mutase, I671V
atgttaagagctaagaatcagctttttttactttcacctcattacctgaggcaggtaaaagaatcatcaggctccaggctcatacagcaacgacttctacaccagcaacagccccttcacccagaatgggctgccctggctaaaaagcagctgaaaggcaaaaacccagaagacctaatatggcacaccccggaagggatctctataaaacccttgtattccaagagagatactatggacttacctgaagaacttccaggagtgaagccattcacacgtggaccatatcctaccatgtatacctttaggccctggaccatccgccagtatgctggttttagtactgtggaagaaagcaataagttctataaggacaacattaaggctggtcagcagggattatcagttgcctttgatctggcgacacatcgtggctatgattcagacaaccctcgagttcgtggtgatgttggaatggctggagttgctattgacactgtggaagataccaaaattctttttgatggaattcctttagaaaaaatgtcagtttccatgactatgaatggagcagttattccagttcttgcaaattttatagtaactggagaagaacaaggtgtacctaaagagaaacttactggtaccatccaaaatgatatactaaaggaatttatggttcgaaatacatacatttttcctccagaaccatccatgaaaattattgctgacatatttgaatatacagcaaagcacatgccaaaatttaattcaatttcaattagtggataccatatgcaggaagcaggggctgatgccattctggagctggcctatactttagcagatggattggagtactctaggactggactccaggctggcctgacaattgatgaatttgcaccaaggttgtctttcttctggggaattggaatgaatttctatatggaaatagcaaagatgagagctggtagaagactctgggctcacttaatagagaaaatgtttcagcctaaaaactcaaaatctcttcttctaagagcacactgtcagacatctggatggtcacttactgagcaggatccctacaataatattgtccgtactgcaatagaagcaatggcagcagtatttggagggactcagtctttgcacacaaattcttttgatgaagctttgggtttgccaactgtgaaaagtgctcgaattgccaggaacacacaaatcatcattcaagaagaatctgggattcccaaagtggctgatccttggggaggttcttacatgatggaatgtctcacaaatgatgtttatgatgctgctttaaagctcattaatgaaattgaagaaatgggtggaatggccaaagctgtagctgagggaatacctaaacttcgaattgaagaatgtgctgcccgaagacaagctagaatagattctggttctgaagtaattgttggagtaaataagtaccagttggaaaaagaagacgctgtagaagttctggcaattgataatacttcagtgcgaaacaggcagattgaaaaacttaagaagatcaaatccagcagggatcaagctttggctgaacgttgccttgctgcactaaccgaatgtgctgctagcggagatggaaatatcctggctcttgcagtggatgcatctcgggcaagatgtacagtgggagaaatcacagatgccctgaaaaaggtatttggtgaacataaagcgaatgatcgaatggtgagtggagcatatcgccaggaatttggagaaagtaaagagataacatctgctatcaagagggttcataaattcatggaacgtgaaggtcgcagacctcgtcttcttgtagcaaaaatgggacaagatggccatgacagaggagcaaaagttattgctacaggatttgctgatcttggttttgatgtggacataggccctcttttccagactcctcgtgaagtggcccagcaggctgtggatgcggatgtgcatgctgtgggcgtaagcaccctcgctgctggtcataaaaccctagttcctgaactcatcaaagaacttaactcccttggacggccagatattcttgtcatgtgtggaggggtgataccacctcaggattatgaatttctgtttgaagttggtgtttccaatgtatttggtcctgggactcgaattccaaaggctgccgttcaggtgcttgatgatattgagaagtgtttggaaaagaagcagcaatctgta

SEQ ID NO: 426 - protein, 322 aa, Homo sapiens
  source 1..322: note = arginase-1  wt, isoform 1
MSAKSRTIGIIGAPFSKGQPRGGVEEGPTVLRKAGLLEKLKEQECDVKDYGDLPFADIPNDSPFQIVKNPRSVGKASEQLAGKVAEVKKNGRISLVLGGDHSLAIGSISGHARVHPDLGVIWVDAHTDINTPLTTTSGNLHGQPVSFLLKELKGKIPDVPGFSWVTPCISAKDIVYIGLRDVDPGEHYILKTLGIKYFSMTEVDRLGIGKVMEETLSYLLGRKKRPIHLSFDVDGLDPSFTPATGTPVVGGLTYREGLYITEEIYKTGLLSGLDIMEVNPSLGKTPEEVTRTVNTAVAITLACFGLAREGNHKPIDYLNPPK

SEQ ID NO: 427 - DNA, 966 bp, Homo sapiens
  source 1..966: mol_type = genomic DNA; note = arginase-1  wt, isoform 1
atgagcgccaagtccagaaccatagggattattggagctcctttctcaaagggacagccacgaggaggggtggaagaaggccctacagtattgagaaaggctggtctgcttgagaaacttaaagaacaagagtgtgatgtgaaggattatggggacctgccctttgctgacatccctaatgacagtccctttcaaattgtgaagaatccaaggtctgtgggaaaagcaagcgagcagctggctggcaaggtggcagaagtcaagaagaacggaagaatcagcctggtgctgggcggagaccacagtttggcaattggaagcatctctggccatgccagggtccaccctgatcttggagtcatctgggtggatgctcacactgatatcaacactccactgacaaccacaagtggaaacttgcatggacaacctgtatctttcctcctgaaggaactaaaaggaaagattcccgatgtgccaggattctcctgggtgactccctgtatatctgccaaggatattgtgtatattggcttgagagacgtggaccctggggaacactacattttgaaaactctaggcattaaatacttttcaatgactgaagtggacagactaggaattggcaaggtgatggaagaaacactcagctatctactaggaagaaagaaaaggccaattcatctaagttttgatgttgacggactggacccatctttcacaccagctactggcacaccagtcgtgggaggtctgacatacagagaaggtctctacatcacagaagaaatctacaaaacagggctactctcaggattagatataatggaagtgaacccatccctggggaagacaccagaagaagtaactcgaacagtgaacacagcagttgcaataaccttggcttgtttcggacttgctcgggagggtaatcacaagcctattgactaccttaacccacctaag

SEQ ID NO: 428 - protein, 330 aa, Homo sapiens
  source 1..330: note = arginase-1  wt, isoform 2
MSAKSRTIGIIGAPFSKGQPRGGVEEGPTVLRKAGLLEKLKEQVTQNFLILECDVKDYGDLPFADIPNDSPFQIVKNPRSVGKASEQLAGKVAEVKKNGRISLVLGGDHSLAIGSISGHARVHPDLGVIWVDAHTDINTPLTTTSGNLHGQPVSFLLKELKGKIPDVPGFSWVTPCISAKDIVYIGLRDVDPGEHYILKTLGIKYFSMTEVDRLGIGKVMEETLSYLLGRKKRPIHLSFDVDGLDPSFTPATGTPVVGGLTYREGLYITEEIYKTGLLSGLDIMEVNPSLGKTPEEVTRTVNTAVAITLACFGLAREGNHKPIDYLNPPK

SEQ ID NO: 429 - DNA, 990 bp, Homo sapiens
  source 1..990: mol_type = genomic DNA; note = arginase-1  wt, isoform 2
atgagcgccaagtccagaaccatagggattattggagctcctttctcaaagggacagccacgaggaggggtggaagaaggccctacagtattgagaaaggctggtctgcttgagaaacttaaagaacaagtaactcaaaactttttaattttagagtgtgatgtgaaggattatggggacctgccctttgctgacatccctaatgacagtccctttcaaattgtgaagaatccaaggtctgtgggaaaagcaagcgagcagctggctggcaaggtggcagaagtcaagaagaacggaagaatcagcctggtgctgggcggagaccacagtttggcaattggaagcatctctggccatgccagggtccaccctgatcttggagtcatctgggtggatgctcacactgatatcaacactccactgacaaccacaagtggaaacttgcatggacaacctgtatctttcctcctgaaggaactaaaaggaaagattcccgatgtgccaggattctcctgggtgactccctgtatatctgccaaggatattgtgtatattggcttgagagacgtggaccctggggaacactacattttgaaaactctaggcattaaatacttttcaatgactgaagtggacagactaggaattggcaaggtgatggaagaaacactcagctatctactaggaagaaagaaaaggccaattcatctaagttttgatgttgacggactggacccatctttcacaccagctactggcacaccagtcgtgggaggtctgacatacagagaaggtctctacatcacagaagaaatctacaaaacagggctactctcaggattagatataatggaagtgaacccatccctggggaagacaccagaagaagtaactcgaacagtgaacacagcagttgcaataaccttggcttgtttcggacttgctcgggagggtaatcacaagcctattgactaccttaacccacctaag

SEQ ID NO: 430 - protein, 361 aa, Homo sapiens [sequence omitted]

SEQ ID NO: 431 - DNA, 1083 bp, Homo sapiens
  source 1..1083: mol_type = genomic DNA; note = porphobilinogen deaminase wt, isoform 1
atgtctggtaacggcaatgcggctgcaacggcggaagaaaacagcccaaagatgagagtgattcgcgtgggtacccgcaagagccagcttgctcgcatacagacggacagtgtggtggcaacattgaaagcctcgtaccctggcctgcagtttgaaatcattgctatgtccaccacaggggacaagattcttgatactgcactctctaagattggagagaaaagcctgtttaccaaggagcttgaacatgccctggagaagaatgaagtggacctggttgttcactccttgaaggacctgcccactgtgcttcctcctggcttcaccatcggagccatctgcaagcgggaaaaccctcatgatgctgttgtctttcacccaaaatttgttgggaagaccctagaaaccctgccagagaagagtgtggtgggaaccagctccctgcgaagagcagcccagctgcagagaaagttcccgcatctggagttcaggagtattcggggaaacctcaacacccggcttcggaagctggacgagcagcaggagttcagtgccatcatcctggcaacagctggcctgcagcgcatgggctggcacaaccgggtggggcagatcctgcaccctgaggaatgcatgtatgctgtgggccagggggccttgggcgtggaagtgcgagccaaggaccaggacatcttggatctggtgggtgtgctgcacgatcccgagactctgcttcgctgcatcgctgaaagggccttcctgaggcacctggaaggaggctgcagtgtgccagtagccgtgcatacagctatgaaggatgggcaactgtacctgactggaggagtctggagcctagacggctcagatagcatacaagagaccatgcaggctaccatccatgtccctgcccagcatgaagatggccctgaggatgacccacagttggtaggcatcactgctcgtaacattccacgagggccccagttggctgcccagaacttgggcatcagcctggccaacttgttgctgagcaaaggagccaaaaacatcctggatgttgcacggcagcttaacgatgcccat

SEQ ID NO: 432 - protein, 344 aa, Homo sapiens
  source 1..344: note = porphobilinogen deaminase wt, isoform 2
MRVIRVGTRKSQLARIQTDSVVATLKASYPGLQFEIIAMSTTGDKILDTALSKIGEKSLFTKELEHALEKNEVDLVVHSLKDLPTVLPPGFTIGAICKRENPHDAVVFHPKFVGKTLETLPEKSVVGTSSLRRAAQLQRKFPHLEFRSIRGNLNTRLRKLDEQQEFSAIILATAGLQRMGWHNRVGQILHPEECMYAVGQGALGVEVRAKDQDILDLVGVLHDPETLLRCIAERAFLRHLEGGCSVPVAVHTAMKDGQLYLTGGVWSLDGSDSIQETMQATIHVPAQHEDGPEDDPQLVGITARNIPRGPQLAAQNLGISLANLLLSKGAKNILDVARQLNDAH

SEQ ID NO: 433 - DNA, 1032 bp, Homo sapiens
  source 1..1032: mol_type = genomic DNA; note = porphobilinogen deaminase wt, isoform 2
atgagagtgattcgcgtgggtacccgcaagagccagcttgctcgcatacagacggacagtgtggtggcaacattgaaagcctcgtaccctggcctgcagtttgaaatcattgctatgtccaccacaggggacaagattcttgatactgcactctctaagattggagagaaaagcctgtttaccaaggagcttgaacatgccctggagaagaatgaagtggacctggttgttcactccttgaaggacctgcccactgtgcttcctcctggcttcaccatcggagccatctgcaagcgggaaaaccctcatgatgctgttgtctttcacccaaaatttgttgggaagaccctagaaaccctgccagagaagagtgtggtgggaaccagctccctgcgaagagcagcccagctgcagagaaagttcccgcatctggagttcaggagtattcggggaaacctcaacacccggcttcggaagctggacgagcagcaggagttcagtgccatcatcctggcaacagctggcctgcagcgcatgggctggcacaaccgggtggggcagatcctgcaccctgaggaatgcatgtatgctgtgggccagggggccttgggcgtggaagtgcgagccaaggaccaggacatcttggatctggtgggtgtgctgcacgatcccgagactctgcttcgctgcatcgctgaaagggccttcctgaggcacctggaaggaggctgcagtgtgccagtagccgtgcatacagctatgaaggatgggcaactgtacctgactggaggagtctggagcctagacggctcagatagcatacaagagaccatgcaggctaccatccatgtccctgcccagcatgaagatggccctgaggatgacccacagttggtaggcatcactgctcgtaacattccacgagggccccagttggctgcccagaacttgggcatcagcctggccaacttgttgctgagcaaaggagccaaaaacatcctggatgttgcacggcagcttaacgatgcccat

SEQ ID NO: 434 - protein, 321 aa, Homo sapiens
  source 1..321: note = porphobilinogen deaminase wt, isoform 3
MSGNGNAAATAEENSPKMRVIRVGTRKSQLARIQTDSVVATLKASYPGLQFEIIAMSTTGDKILDTALSKIGEKSLFTKELEHALEKNEVDLVVHSLKDLPTVLPPGFTIGAICKRENPHDAVVFHPKFVGKTLETLPEKSVVGTSSLRRAAQLQRKFPHLEFRSIRGNLNTRLRKLDEQQEFSAIILATAGLQRMGWHNRVGQILHPEECMYAVGQEGGCSVPVAVHTAMKDGQLYLTGGVWSLDGSDSIQETMQATIHVPAQHEDGPEDDPQLVGITARNIPRGPQLAAQNLGISLANLLLSKGAKNILDVARQLNDAH

SEQ ID NO: 435 - DNA, 963 bp, Homo sapiens
  source 1..963: mol_type = genomic DNA; note = porphobilinogen deaminase wt, isoform 3
atgtctggtaacggcaatgcggctgcaacggcggaagaaaacagcccaaagatgagagtgattcgcgtgggtacccgcaagagccagcttgctcgcatacagacggacagtgtggtggcaacattgaaagcctcgtaccctggcctgcagtttgaaatcattgctatgtccaccacaggggacaagattcttgatactgcactctctaagattggagagaaaagcctgtttaccaaggagcttgaacatgccctggagaagaatgaagtggacctggttgttcactccttgaaggacctgcccactgtgcttcctcctggcttcaccatcggagccatctgcaagcgggaaaaccctcatgatgctgttgtctttcacccaaaatttgttgggaagaccctagaaaccctgccagagaagagtgtggtgggaaccagctccctgcgaagagcagcccagctgcagagaaagttcccgcatctggagttcaggagtattcggggaaacctcaacacccggcttcggaagctggacgagcagcaggagttcagtgccatcatcctggcaacagctggcctgcagcgcatgggctggcacaaccgggtggggcagatcctgcaccctgaggaatgcatgtatgctgtgggccaggaaggaggctgcagtgtgccagtagccgtgcatacagctatgaaggatgggcaactgtacctgactggaggagtctggagcctagacggctcagatagcatacaagagaccatgcaggctaccatccatgtccctgcccagcatgaagatggccctgaggatgacccacagttggtaggcatcactgctcgtaacattccacgagggccccagttggctgcccagaacttgggcatcagcctggccaacttgttgctgagcaaaggagccaaaaacatcctggatgttgcacggcagcttaacgatgcccat

SEQ ID NO: 436 - protein, 304 aa, Homo sapiens
  source 1..304: note = porphobilinogen deaminase wt, isoform 4
MRVIRVGTRKSQLARIQTDSVVATLKASYPGLQFEIIAMSTTGDKILDTALSKIGEKSLFTKELEHALEKNEVDLVVHSLKDLPTVLPPGFTIGAICKRENPHDAVVFHPKFVGKTLETLPEKSVVGTSSLRRAAQLQRKFPHLEFRSIRGNLNTRLRKLDEQQEFSAIILATAGLQRMGWHNRVGQILHPEECMYAVGQEGGCSVPVAVHTAMKDGQLYLTGGVWSLDGSDSIQETMQATIHVPAQHEDGPEDDPQLVGITARNIPRGPQLAAQNLGISLANLLLSKGAKNILDVARQLNDAH

SEQ ID NO: 437 - DNA, 912 bp, Homo sapiens
  source 1..912: mol_type = genomic DNA; note = porphobilinogen deaminase wt, isoform 4
atgagagtgattcgcgtgggtacccgcaagagccagcttgctcgcatacagacggacagtgtggtggcaacattgaaagcctcgtaccctggcctgcagtttgaaatcattgctatgtccaccacaggggacaagattcttgatactgcactctctaagattggagagaaaagcctgtttaccaaggagcttgaacatgccctggagaagaatgaagtggacctggttgttcactccttgaaggacctgcccactgtgcttcctcctggcttcaccatcggagccatctgcaagcgggaaaaccctcatgatgctgttgtctttcacccaaaatttgttgggaagaccctagaaaccctgccagagaagagtgtggtgggaaccagctccctgcgaagagcagcccagctgcagagaaagttcccgcatctggagttcaggagtattcggggaaacctcaacacccggcttcggaagctggacgagcagcaggagttcagtgccatcatcctggcaacagctggcctgcagcgcatgggctggcacaaccgggtggggcagatcctgcaccctgaggaatgcatgtatgctgtgggccaggaaggaggctgcagtgtgccagtagccgtgcatacagctatgaaggatgggcaactgtacctgactggaggagtctggagcctagacggctcagatagcatacaagagaccatgcaggctaccatccatgtccctgcccagcatgaagatggccctgaggatgacccacagttggtaggcatcactgctcgtaacattccacgagggccccagttggctgcccagaacttgggcatcagcctggccaacttgttgctgagcaaaggagccaaaaacatcctggatgttgcacggcagcttaacgatgcccat

SEQ ID NO: 438 - protein, 361 aa, Homo sapiens
  source 1..361: note = porphobilinogen deaminase I291M/N340S
MSGNGNAAATAEENSPKMRVIRVGTRKSQLARIQTDSVVATLKASYPGLQFEIIAMSTTGDKILDTALSKIGEKSLFTKELEHALEKNEVDLVVHSLKDLPTVLPPGFTIGAICKRENPHDAVVFHPKFVGKTLETLPEKSVVGTSSLRRAAQLQRKFPHLEFRSIRGNLNTRLRKLDEQQEFSAIILATAGLQRMGWHNRVGQILHPEECMYAVGQGALGVEVRAKDQDILDLVGVLHDPETLLRCIAERAFLRHLEGGCSVPVAVHTAMKDGQLYLTGGVWSLDGSDSMQETMQATIHVPAQHEDGPEDDPQLVGITARNIPRGPQLAAQNLGISLASLLLSKGAKNILDVARQLNDAH

SEQ ID NO: 439 - DNA, 1083 bp, Homo sapiens
  source 1..1083: mol_type = genomic DNA; note = porphobilinogen deaminase I291M/N340S
atgagcgggaacggcaacgcggcagccaccgctgaggaaaactctccaaaaatgagagtcattagggtgggcaccagaaagagtcaactcgcaaggatccagaccgactctgtggtggccactctaaaagcgagctaccccggactccagttcgaaatcatcgcgatgagcaccaccggcgataaaatcctagataccgccttgagcaagatcggcgagaagagcctctttaccaaggagctggagcacgccctggagaaaaacgaggtggatctggtggtccatagcctaaaggatctccctacagtgctgccccccgggtttaccatcggcgccatttgtaagcgggagaacccgcacgacgcagtggtcttccaccccaagtttgtgggcaagacactggagaccctgccggaaaagtccgtggtgggcacctccagcctgagacgagccgcccagctgcagcgcaagtttccccacctggagtttaggagcatcaggggaaacctcaacaccagactgagaaagctggacgaacagcaggagttcagcgccatcatcctggcgactgcaggactccagaggatgggctggcataatagggtgggacaaattctgcaccccgaggaatgcatgtatgctgtggggcagggcgcactcggggtggaggtgcgggccaaggatcaggacatcctggacctcgtgggcgtgcttcacgacccggaaaccctgctgaggtgcatagcagaaagagctttcctgcggcacctggaggggggatgcagcgtccctgtggccgtgcatacagccatgaaggacggccagctgtacttgactggtggcgtctggtcccttgatggctctgacagcatgcaggaaacaatgcaggccactatccacgtgcctgcccagcacgaggacggccccgaggacgaccctcagctggtgggcattaccgccagaaatatccctaggggaccccagctggctgcccaaaacttgggcatcagcctggccagcctgctgctgagcaaaggagctaaaaacatcctggatgtggccaggcagctgaatgacgcccac

SEQ ID NO: 440 - protein, 604 aa, Homo sapiens
  source 1..604: note = ApoA1-PBGD fusion ApoA1 fusion
MDEPPQSPWDRVKDLATVYVDVLKDSGRDYVSQFEGSALGKQLNLKLLDNWDSVTSTFSKLREQLGPVTQEFWDNLEKETEGLRQEMSKDLEEVKAKVQPYLDDFQKKWQEEMELYRQKVEPLRAELQEGARQKLHELQEKLSPLGEEMRDRARAHVDALRTHLAPYSDELRQRLAARLEALKENGGARLAEYHAKATEHLSTLSEKAKPALEDLRQGLLPVLESFKVSFLSALEEYTKKLNTQSGNGNAAATAEENSPKMRVIRVGTRKSQLARIQTDSVVATLKASYPGLQFEIIAMSTTGDKILDTALSKIGEKSLFTKELEHALEKNEVDLVVHSLKDLPTVLPPGFTIGAICKRENPHDAVVFHPKFVGKTLETLPEKSVVGTSSLRRAAQLQRKFPHLEFRSIRGNLNTRLRKLDEQQEFSAIILATAGLQRMGWHNRVGQILHPEECMYAVGQGALGVEVRAKDQDILDLVGVLHDPETLLRCIAERAFLRHLEGGCSVPVAVHTAMKDGQLYLTGGVWSLDGSDSMQETMQATIHVPAQHEDGPEDDPQLVGITARNIPRGPQLAAQNLGISLASLLLSKGAKNILDVARQLNDAH

SEQ ID NO: 441 - DNA, 1812 bp, Homo sapiens
  source 1..1812: mol_type = genomic DNA; note = ApoA1-PBGD fusion ApoA1 fusion
atggacgaaccaccccagtcaccctgggatagagtcaaagacctggccactgtgtacgtggacgtgctgaaagatagcgggcgggattacgtctcgcagttcgagggctccgccttaggcaaacagctgaacctcaaactgctggacaattgggactccgtcactagcacattctccaagctgagagagcagctgggacctgtgactcaggagttctgggacaatctggagaaggaaactgagggcctgaggcaggagatgtccaaggatctggaggaggttaaggcaaaggtgcaaccctacctcgacgacttccagaaaaaatggcaagaagagatggagctataccggcaaaaggtggagcctctccgggccgagctccaggagggcgctcggcaaaagctgcatgagctgcaggagaagctgagccccctcggcgaggaaatgcgtgatagagcacgtgcccacgtggacgccctgcggacacatctggctccctacagcgatgagcttaggcagagactggccgccagactcgaagctctgaaggagaatggcggcgctcggctggccgagtatcatgccaaggccaccgagcatttgtccactctgagtgagaaggctaagcctgccctggaggacctgaggcagggcctgttacccgtgctggagagcttcaaggtgagctttctgagcgccttggaggagtacaccaaaaaactgaacacccagagcggcaacggaaacgccgccgctaccgccgaggagaacagccctaagatgagggtgatcagggtgggcacccgcaagtcccagcttgcacgaatccagaccgattcagtcgtggcgaccctgaaggcatcttaccccggcctgcagttcgagattatcgccatgtctacaaccggcgacaagatcctcgataccgccctgagcaagatcggcgaaaagagcctgttcaccaaagagctagagcacgccctcgagaaaaacgaggtggaccttgtggtgcatagcctcaaggatcttcctaccgtgctgccccccggtttcaccattggggcaatctgcaagagggagaatccccacgatgccgtggtgttccatcccaaattcgtgggcaaaacgttggagaccctgcccgagaaaagtgtggtcggcactagcagcctgagaagagcggcccaacttcagagaaagtttcctcacctggagttcaggagcatccggggcaacctgaacacccggctgcggaagctggacgagcagcaagagttcagcgctatcattctagcaacagccggcctgcagcgcatgggatggcataacagggtgggacagattctccaccccgaggaatgcatgtacgccgttggccaaggcgcgctgggggtggaggtcagagcaaaggaccaggacattcttgatctggtcggggtgctgcacgaccccgagacactgctgagatgcatagctgagcgggccttcctgcggcatctggagggcggctgctcagtccccgtggccgtgcacacagccatgaaggacggccagctgtacctgaccggaggggtgtggagcttggacggcagcgattcaatgcaggagacaatgcaggcaaccatccacgttccagctcagcacgaggatggccccgaagatgaccctcagctggtggggattactgctagaaacatcccccgcggcccccagctggccgcccaaaacctgggaatctctctggcctccctgctcctctctaaaggagccaagaatattctggacgtggcacggcagctcaacgatgcacac

SEQ ID NO: 442 - protein, 1286 aa, Homo sapiens
  source 1..1286: note = phosphatidylcholine translocator ABCB4 wt, isoform 1
MDLEAAKNGTAWRPTSAEGDFELGISSKQKRKKTKTVKMIGVLTLFRYSDWQDKLFMSLGTIMAIAHGSGLPLMMIVFGEMTDKFVDTAGNFSFPVNFSLSLLNPGKILEEEMTRYAYYYSGLGAGVLVAAYIQVSFWTLAAGRQIRKIRQKFFHAILRQEIGWFDINDTTELNTRLTDDISKISEGIGDKVGMFFQAVATFFAGFIVGFIRGWKLTLVIMAISPILGLSAAVWAKILSAFSDKELAAYAKAGAVAEEALGAIRTVIAFGGQNKELERYQKHLENAKEIGIKKAISANISMGIAFLLIYASYALAFWYGSTLVISKEYTIGNAMTVFFSILIGAFSVGQAAPCIDAFANARGAAYVIFDIIDNNPKIDSFSERGHKPDSIKGNLEFNDVHFSYPSRANVKILKGLNLKVQSGQTVALVGSSGCGKSTTVQLIQRLYDPDEGTINIDGQDIRNFNVNYLREIIGVVSQEPVLFSTTIAENICYGRGNVTMDEIKKAVKEANAYEFIMKLPQKFDTLVGERGAQLSGGQKQRIAIARALVRNPKILLLDEATSALDTESEAEVQAALDKAREGRTTIVIAHRLSTVRNADVIAGFEDGVIVEQGSHSELMKKEGVYFKLVNMQTSGSQIQSEEFELNDEKAATRMAPNGWKSRLFRHSTQKNLKNSQMCQKSLDVETDGLEANVPPVSFLKVLKLNKTEWPYFVVGTVCAIANGGLQPAFSVIFSEIIAIFGPGDDAVKQQKCNIFSLIFLFLGIISFFTFFLQGFTFGKAGEILTRRLRSMAFKAMLRQDMSWFDDHKNSTGALSTRLATDAAQVQGATGTRLALIAQNIANLGTGIIISFIYGWQLTLLLLAVVPIIAVSGIVEMKLLAGNAKRDKKELEAAGKIATEAIENIRTVVSLTQERKFESMYVEKLYGPYRNSVQKAHIYGITFSISQAFMYFSYAGCFRFGAYLIVNGHMRFRDVILVFSAIVFGAVALGHASSFAPDYAKAKLSAAHLFMLFERQPLIDSYSEEGLKPDKFEGNITFNEVVFNYPTRANVPVLQGLSLEVKKGQTLALVGSSGCGKSTVVQLLERFYDPLAGTVFVDFGFQLLDGQEAKKLNVQWLRAQLGIVSQEPILFDCSIAENIAYGDNSRVVSQDEIVSAAKAANIHPFIETLPHKYETRVGDKGTQLSGGQKQRIAIARALIRQPQILLLDEATSALDTESEKVVQEALDKAREGRTCIVIAHRLSTIQNADLIVVFQNGRVKEHGTHQQLLAQKGIYFSMVSVQAGTQNL

SEQ ID NO: 443 - DNA, 3858 bp, Homo sapiens
  source 1..3858: mol_type = genomic DNA; note = phosphatidylcholine translocator ABCB4 wt, isoform 1
atggatcttgaggcggcaaagaacggaacagcctggcgccccacgagcgcggagggcgactttgaactgggcatcagcagcaaacaaaaaaggaaaaaaacgaagacagtgaaaatgattggagtattaacattgtttcgatactccgattggcaggataaattgtttatgtcgctgggtaccatcatggccatagctcacggatcaggtctccccctcatgatgatagtatttggagagatgactgacaaatttgttgatactgcaggaaacttctcctttccagtgaacttttccttgtcgctgctaaatccaggcaaaattctggaagaagaaatgactagatatgcatattactactcaggattgggtgctggagttcttgttgctgcctatatacaagtttcattttggactttggcagctggtcgacagatcaggaaaattaggcagaagttttttcatgctattctacgacaggaaataggatggtttgacatcaacgacaccactgaactcaatacgcggctaacagatgacatctccaaaatcagtgaaggaattggtgacaaggttggaatgttctttcaagcagtagccacgttttttgcaggattcatagtgggattcatcagaggatggaagctcacccttgtgataatggccatcagccctattctaggactctctgcagccgtttgggcaaagatactctcggcatttagtgacaaagaactagctgcttatgcaaaagcaggcgccgtggcagaagaggctctgggggccatcaggactgtgatagctttcgggggccagaacaaagagctggaaaggtatcagaaacatttagaaaatgccaaagagattggaattaaaaaagctatttcagcaaacatttccatgggtattgccttcctgttaatatatgcatcatatgcactggccttctggtatggatccactctagtcatatcaaaagaatatactattggaaatgcaatgacagtttttttttcaatcctaattggagctttcagtgttggccaggctgccccatgtattgatgcttttgccaatgcaagaggagcagcatatgtgatctttgatattattgataataatcctaaaattgacagtttttcagagagaggacacaaaccagacagcatcaaagggaatttggagttcaatgatgttcacttttcttacccttctcgagctaacgtcaagatcttgaagggcctcaacctgaaggtgcagagtgggcagacggtggccctggttggaagtagtggctgtgggaagagcacaacggtccagctgatacagaggctctatgaccctgatgagggcacaattaacattgatgggcaggatattaggaactttaatgtaaactatctgagggaaatcattggtgtggtgagtcaggagccggtgctgttttccaccacaattgctgaaaatatttgttatggccgtggaaatgtaaccatggatgagataaagaaagctgtcaaagaggccaacgcctatgagtttatcatgaaattaccacagaaatttgacaccctggttggagagagaggggcccagctgagtggtgggcagaagcagaggatcgccattgcacgtgccctggttcgcaaccccaagatccttctgctggatgaggccacgtcagcattggacacagaaagtgaagctgaggtacaggcagctctggataaggccagagaaggccggaccaccattgtgatagcacaccgactgtctacggtccgaaatgcagatgtcatcgctgggtttgaggatggagtaattgtggagcaaggaagccacagcgaactgatgaagaaggaaggggtgtacttcaaacttgtcaacatgcagacatcaggaagccagatccagtcagaagaatttgaactaaatgatgaaaaggctgccactagaatggccccaaatggctggaaatctcgcctatttaggcattctactcagaaaaaccttaaaaattcacaaatgtgtcagaagagccttgatgtggaaaccgatggacttgaagcaaatgtgccaccagtgtcctttctgaaggtcctgaaactgaataaaacagaatggccctactttgtcgtgggaacagtatgtgccattgccaatggggggcttcagccggcattttcagtcatattctcagagatcatagcgatttttggaccaggcgatgatgcagtgaagcagcagaagtgcaacatattctctttgattttcttatttctgggaattatttctttttttactttcttccttcagggtttcacgtttgggaaagctggcgagatcctcaccagaagactgcggtcaatggcttttaaagcaatgctaagacaggacatgagctggtttgatgaccataaaaacagtactggtgcactttctacaagacttgccacagatgctgcccaagtccaaggagccacaggaaccaggttggctttaattgcacagaatatagctaaccttggaactggtattatcatatcatttatctacggttggcagttaaccctattgctattagcagttgttccaattattgctgtgtcaggaattgttgaaatgaaattgttggctggaaatgccaaaagagataaaaaagaactggaagctgctggaaagattgcaacagaggcaatagaaaatattaggacagttgtgtctttgacccaggaaagaaaatttgaatcaatgtatgttgaaaaattgtatggaccttacaggaattctgtgcagaaggcacacatctatggaattacttttagtatctcacaagcatttatgtatttttcctatgccggttgttttcgatttggtgcatatctcattgtgaatggacatatgcgcttcagagatgttattctggtgttttctgcaattgtatttggtgcagtggctctaggacatgccagttcatttgctccagactatgctaaagctaagctgtctgcagcccacttattcatgctgtttgaaagacaacctctgattgacagctacagtgaagaggggctgaagcctgataaatttgaaggaaatataacatttaatgaagtcgtgttcaactatcccacccgagcaaacgtgccagtgcttcaggggctgagcctggaggtgaagaaaggccagacactagccctggtgggcagcagtggctgtgggaagagcacggtggtccagctcctggagcggttctacgaccccttggcggggacagtgtttgtggactttggttttcagcttctcgatggtcaagaagcaaagaaactcaatgtccagtggctcagagctcaactcggaatcgtgtctcaggagcctatcctatttgactgcagcattgccgagaatattgcctatggagacaacagccgggttgtatcacaggatgaaattgtgagtgcagccaaagctgccaacatacatcctttcatcgagacgttaccccacaaatatgaaacaagagtgggagataaggggactcagctctcaggaggtcaaaaacagaggattgctattgcccgagccctcatcagacaacctcaaatcctcctgttggatgaagctacatcagctctggatactgaaagtgaaaaggttgtccaagaagccctggacaaagccagagaaggccgcacctgcattgtgattgctcaccgcctgtccaccatccagaatgcagacttaatagtggtgtttcagaatgggagagtcaaggagcatggcacgcatcagcagctgctggcacagaaaggcatctatttttcaatggtcagtgtccaggctgggacacagaactta

SEQ ID NO: 444 - protein, 1279 aa, Homo sapiens
  source 1..1279: note = phosphatidylcholine translocator ABCB4 wt, isoform 2
MDLEAAKNGTAWRPTSAEGDFELGISSKQKRKKTKTVKMIGVLTLFRYSDWQDKLFMSLGTIMAIAHGSGLPLMMIVFGEMTDKFVDTAGNFSFPVNFSLSLLNPGKILEEEMTRYAYYYSGLGAGVLVAAYIQVSFWTLAAGRQIRKIRQKFFHAILRQEIGWFDINDTTELNTRLTDDISKISEGIGDKVGMFFQAVATFFAGFIVGFIRGWKLTLVIMAISPILGLSAAVWAKILSAFSDKELAAYAKAGAVAEEALGAIRTVIAFGGQNKELERYQKHLENAKEIGIKKAISANISMGIAFLLIYASYALAFWYGSTLVISKEYTIGNAMTVFFSILIGAFSVGQAAPCIDAFANARGAAYVIFDIIDNNPKIDSFSERGHKPDSIKGNLEFNDVHFSYPSRANVKILKGLNLKVQSGQTVALVGSSGCGKSTTVQLIQRLYDPDEGTINIDGQDIRNFNVNYLREIIGVVSQEPVLFSTTIAENICYGRGNVTMDEIKKAVKEANAYEFIMKLPQKFDTLVGERGAQLSGGQKQRIAIARALVRNPKILLLDEATSALDTESEAEVQAALDKAREGRTTIVIAHRLSTVRNADVIAGFEDGVIVEQGSHSELMKKEGVYFKLVNMQTSGSQIQSEEFELNDEKAATRMAPNGWKSRLFRHSTQKNLKNSQMCQKSLDVETDGLEANVPPVSFLKVLKLNKTEWPYFVVGTVCAIANGGLQPAFSVIFSEIIAIFGPGDDAVKQQKCNIFSLIFLFLGIISFFTFFLQGFTFGKAGEILTRRLRSMAFKAMLRQDMSWFDDHKNSTGALSTRLATDAAQVQGATGTRLALIAQNIANLGTGIIISFIYGWQLTLLLLAVVPIIAVSGIVEMKLLAGNAKRDKKELEAAGKIATEAIENIRTVVSLTQERKFESMYVEKLYGPYRNSVQKAHIYGITFSISQAFMYFSYAGCFRFGAYLIVNGHMRFRDVILVFSAIVFGAVALGHASSFAPDYAKAKLSAAHLFMLFERQPLIDSYSEEGLKPDKFEGNITFNEVVFNYPTRANVPVLQGLSLEVKKGQTLALVGSSGCGKSTVVQLLERFYDPLAGTVLLDGQEAKKLNVQWLRAQLGIVSQEPILFDCSIAENIAYGDNSRVVSQDEIVSAAKAANIHPFIETLPHKYETRVGDKGTQLSGGQKQRIAIARALIRQPQILLLDEATSALDTESEKVVQEALDKAREGRTCIVIAHRLSTIQNADLIVVFQNGRVKEHGTHQQLLAQKGIYFSMVSVQAGTQNL

SEQ ID NO: 445 - DNA, 3837 bp, Homo sapiens
  source 1..3837: mol_type = genomic DNA; note = phosphatidylcholine translocator ABCB4 wt, isoform 2
atggatcttgaggcggcaaagaacggaacagcctggcgccccacgagcgcggagggcgactttgaactgggcatcagcagcaaacaaaaaaggaaaaaaacgaagacagtgaaaatgattggagtattaacattgtttcgatactccgattggcaggataaattgtttatgtcgctgggtaccatcatggccatagctcacggatcaggtctccccctcatgatgatagtatttggagagatgactgacaaatttgttgatactgcaggaaacttctcctttccagtgaacttttccttgtcgctgctaaatccaggcaaaattctggaagaagaaatgactagatatgcatattactactcaggattgggtgctggagttcttgttgctgcctatatacaagtttcattttggactttggcagctggtcgacagatcaggaaaattaggcagaagttttttcatgctattctacgacaggaaataggatggtttgacatcaacgacaccactgaactcaatacgcggctaacagatgacatctccaaaatcagtgaaggaattggtgacaaggttggaatgttctttcaagcagtagccacgttttttgcaggattcatagtgggattcatcagaggatggaagctcacccttgtgataatggccatcagccctattctaggactctctgcagccgtttgggcaaagatactctcggcatttagtgacaaagaactagctgcttatgcaaaagcaggcgccgtggcagaagaggctctgggggccatcaggactgtgatagctttcgggggccagaacaaagagctggaaaggtatcagaaacatttagaaaatgccaaagagattggaattaaaaaagctatttcagcaaacatttccatgggtattgccttcctgttaatatatgcatcatatgcactggccttctggtatggatccactctagtcatatcaaaagaatatactattggaaatgcaatgacagtttttttttcaatcctaattggagctttcagtgttggccaggctgccccatgtattgatgcttttgccaatgcaagaggagcagcatatgtgatctttgatattattgataataatcctaaaattgacagtttttcagagagaggacacaaaccagacagcatcaaagggaatttggagttcaatgatgttcacttttcttacccttctcgagctaacgtcaagatcttgaagggcctcaacctgaaggtgcagagtgggcagacggtggccctggttggaagtagtggctgtgggaagagcacaacggtccagctgatacagaggctctatgaccctgatgagggcacaattaacattgatgggcaggatattaggaactttaatgtaaactatctgagggaaatcattggtgtggtgagtcaggagccggtgctgttttccaccacaattgctgaaaatatttgttatggccgtggaaatgtaaccatggatgagataaagaaagctgtcaaagaggccaacgcctatgagtttatcatgaaattaccacagaaatttgacaccctggttggagagagaggggcccagctgagtggtgggcagaagcagaggatcgccattgcacgtgccctggttcgcaaccccaagatccttctgctggatgaggccacgtcagcattggacacagaaagtgaagctgaggtacaggcagctctggataaggccagagaaggccggaccaccattgtgatagcacaccgactgtctacggtccgaaatgcagatgtcatcgctgggtttgaggatggagtaattgtggagcaaggaagccacagcgaactgatgaagaaggaaggggtgtacttcaaacttgtcaacatgcagacatcaggaagccagatccagtcagaagaatttgaactaaatgatgaaaaggctgccactagaatggccccaaatggctggaaatctcgcctatttaggcattctactcagaaaaaccttaaaaattcacaaatgtgtcagaagagccttgatgtggaaaccgatggacttgaagcaaatgtgccaccagtgtcctttctgaaggtcctgaaactgaataaaacagaatggccctactttgtcgtgggaacagtatgtgccattgccaatggggggcttcagccggcattttcagtcatattctcagagatcatagcgatttttggaccaggcgatgatgcagtgaagcagcagaagtgcaacatattctctttgattttcttatttctgggaattatttctttttttactttcttccttcagggtttcacgtttgggaaagctggcgagatcctcaccagaagactgcggtcaatggcttttaaagcaatgctaagacaggacatgagctggtttgatgaccataaaaacagtactggtgcactttctacaagacttgccacagatgctgcccaagtccaaggagccacaggaaccaggttggctttaattgcacagaatatagctaaccttggaactggtattatcatatcatttatctacggttggcagttaaccctattgctattagcagttgttccaattattgctgtgtcaggaattgttgaaatgaaattgttggctggaaatgccaaaagagataaaaaagaactggaagctgctggaaagattgcaacagaggcaatagaaaatattaggacagttgtgtctttgacccaggaaagaaaatttgaatcaatgtatgttgaaaaattgtatggaccttacaggaattctgtgcagaaggcacacatctatggaattacttttagtatctcacaagcatttatgtatttttcctatgccggttgttttcgatttggtgcatatctcattgtgaatggacatatgcgcttcagagatgttattctggtgttttctgcaattgtatttggtgcagtggctctaggacatgccagttcatttgctccagactatgctaaagctaagctgtctgcagcccacttattcatgctgtttgaaagacaacctctgattgacagctacagtgaagaggggctgaagcctgataaatttgaaggaaatataacatttaatgaagtcgtgttcaactatcccacccgagcaaacgtgccagtgcttcaggggctgagcctggaggtgaagaaaggccagacactagccctggtgggcagcagtggctgtgggaagagcacggtggtccagctcctggagcggttctacgaccccttggcggggacagtgcttctcgatggtcaagaagcaaagaaactcaatgtccagtggctcagagctcaactcggaatcgtgtctcaggagcctatcctatttgactgcagcattgccgagaatattgcctatggagacaacagccgggttgtatcacaggatgaaattgtgagtgcagccaaagctgccaacatacatcctttcatcgagacgttaccccacaaatatgaaacaagagtgggagataaggggactcagctctcaggaggtcaaaaacagaggattgctattgcccgagccctcatcagacaacctcaaatcctcctgttggatgaagctacatcagctctggatactgaaagtgaaaaggttgtccaagaagccctggacaaagccagagaaggccgcacctgcattgtgattgctcaccgcctgtccaccatccagaatgcagacttaatagtggtgtttcagaatgggagagtcaaggagcatggcacgcatcagcagctgctggcacagaaaggcatctatttttcaatggtcagtgtccaggctgggacacagaactta

SEQ ID NO: 446 - protein, 379 aa, Homo sapiens
  source 1..379: note = galactose-1-phosphate uridylyltransferase wt, isoform 1
MSRSGTDPQQRQQASEADAAAATFRANDHQHIRYNPLQDEWVLVSAHRMKRPWQGQVEPQLLKTVPRHDPLNPLCPGAIRANGEVNPQYDSTFLFDNDFPALQPDAPSPGPSDHPLFQAKSARGVCKVMCFHPWSDVTLPLMSVPEIRAVVDAWASVTEELGAQYPWVQIFENKGAMMGCSNPHPHCQVWASSFLPDIAQREERSQQAYKSQHGEPLLMEYSRQELLRKERLVLTSEHWLVLVPFWATWPYQTLLLPRRHVRRLPELTPAERDDLASIMKKLLTKYDNLFETSFPYSMGWHGAPTGSEAGANWNHWQLHAHYYPPLLRSATVRKFMVGYEMLAQAQRDLTPEQAAERLRALPEVHYHLGQKDRETATIA

SEQ ID NO: 447 - DNA, 1137 bp, Homo sapiens
  source 1..1137: mol_type = genomic DNA; note = galactose-1-phosphate uridylyltransferase wt, isoform 1
atgtcgcgcagtggaaccgatcctcagcaacgccagcaggcgtcagaggcggacgccgcagcagcaaccttccgggcaaacgaccatcagcatatccgctacaacccgctgcaggatgagtgggtgctggtgtcagctcaccgcatgaagcggccctggcagggtcaagtggagccccagcttctgaagacagtgccccgccatgaccctctcaaccctctgtgtcctggggccatccgagccaacggagaggtgaatccccagtacgatagcaccttcctgtttgacaacgacttcccagctctgcagcctgatgcccccagtccaggacccagtgatcatccccttttccaagcaaagtctgctcgaggagtctgtaaggtcatgtgcttccacccctggtcggatgtaacgctgccactcatgtcggtccctgagatccgggctgttgttgatgcatgggcctcagtcacagaggagctgggtgcccagtacccttgggtgcagatctttgaaaacaaaggtgccatgatgggctgttctaacccccacccccactgccaggtatgggccagcagtttcctgccagatattgcccagcgtgaggagcgatctcagcaggcctataagagtcagcatggagagcccctgctaatggagtacagccgccaggagctactcaggaaggaacgtctggtcctaaccagtgagcactggttagtactggtccccttctgggcaacatggccctaccagacactgctgctgccccgtcggcatgtgcggcggctacctgagctgacccctgctgagcgtgatgatctagcctccatcatgaagaagctcttgaccaagtatgacaacctctttgagacgtcctttccctactccatgggctggcatggggctcccacaggatcagaggctggggccaactggaaccattggcagctgcacgctcattactaccctccgctcctgcgctctgccactgtccggaaattcatggttggctacgaaatgcttgctcaggctcagagggacctcacccctgagcaggctgcagagagactaagggcacttcctgaggttcattaccacctggggcagaaggacagggagacagcaaccatcgcc

SEQ ID NO: 448 - protein, 270 aa, Homo sapiens
  source 1..270: note = galactose-1-phosphate uridylyltransferase wt, isoform 2
MTLSTLCVLGPSEPTESKVMCFHPWSDVTLPLMSVPEIRAVVDAWASVTEELGAQYPWVQIFENKGAMMGCSNPHPHCQVWASSFLPDIAQREERSQQAYKSQHGEPLLMEYSRQELLRKERLVLTSEHWLVLVPFWATWPYQTLLLPRRHVRRLPELTPAERDDLASIMKKLLTKYDNLFETSFPYSMGWHGAPTGSEAGANWNHWQLHAHYYPPLLRSATVRKFMVGYEMLAQAQRDLTPEQAAERLRALPEVHYHLGQKDRETATIA

SEQ ID NO: 449 - DNA, 810 bp, Homo sapiens
  source 1..810: mol_type = genomic DNA; note = galactose-1-phosphate uridylyltransferase wt, isoform 2
atgaccctctcaaccctctgtgtcctggggccatccgagccaacggagagtaaggtcatgtgcttccacccctggtcggatgtaacgctgccactcatgtcggtccctgagatccgggctgttgttgatgcatgggcctcagtcacagaggagctgggtgcccagtacccttgggtgcagatctttgaaaacaaaggtgccatgatgggctgttctaacccccacccccactgccaggtatgggccagcagtttcctgccagatattgcccagcgtgaggagcgatctcagcaggcctataagagtcagcatggagagcccctgctaatggagtacagccgccaggagctactcaggaaggaacgtctggtcctaaccagtgagcactggttagtactggtccccttctgggcaacatggccctaccagacactgctgctgccccgtcggcatgtgcggcggctacctgagctgacccctgctgagcgtgatgatctagcctccatcatgaagaagctcttgaccaagtatgacaacctctttgagacgtcctttccctactccatgggctggcatggggctcccacaggatcagaggctggggccaactggaaccattggcagctgcacgctcattactaccctccgctcctgcgctctgccactgtccggaaattcatggttggctacgaaatgcttgctcaggctcagagggacctcacccctgagcaggctgcagagagactaagggcacttcctgaggttcattaccacctggggcagaaggacagggagacagcaaccatcgcc

SEQ ID NO: 450 - protein, 675 aa, Homo sapiens
  source 1..675: note = citrin wt, isoform 1
MAAAKVALTKRADPAELRTIFLKYASIEKNGEFFMSPNDFVTRYLNIFGESQPNPKTVELLSGVVDQTKDGLISFQEFVAFESVLCAPDALFMVAFQLFDKAGKGEVTFEDVKQVFGQTTIHQHIPFNWDSEFVQLHFGKERKRHLTYAEFTQFLLEIQLEHAKQAFVQRDNARTGRVTAIDFRDIMVTIRPHVLTPFVEECLVAAAGGTTSHQVSFSYFNGFNSLLNNMELIRKIYSTLAGTRKDVEVTKEEFVLAAQKFGQVTPMEVDILFQLADLYEPRGRMTLADIERIAPLEEGTLPFNLAEAQRQKASGDSARPVLLQVAESAYRFGLGSVAGAVGATAVYPIDLVKTRMQNQRSTGSFVGELMYKNSFDCFKKVLRYEGFFGLYRGLLPQLLGVAPEKAIKLTVNDFVRDKFMHKDGSVPLAAEILAGGCAGGSQVIFTNPLEIVKIRLQVAGEITTGPRVSALSVVRDLGFFGIYKGAKACFLRDIPFSAIYFPCYAHVKASFANEDGQVSPGSLLLAGAIAGMPAASLVTPADVIKTRLQVAARAGQTTYSGVIDCFRKILREEGPKALWKGAGARVFRSSPQFGVTLLTYELLQRWFYIDFGGVKPMGSEPVPKSRINLPAPNPDHVGGYKLAVATFAGIENKFGLYLPLFKPSVSTSKAIGGGP

SEQ ID NO: 451 - DNA, 2025 bp, Homo sapiens
  source 1..2025: mol_type = genomic DNA; note = citrin wt, isoform 1
atggcggccgccaaggtggctttaaccaagagagcagatccagctgagcttagaacaatatttttgaagtatgcaagcattgagaaaaacggtgaatttttcatgtcccccaatgactttgtcactcgatacttgaacatttttggagaaagccagcctaatccaaagactgtggaacttttaagtggagtggtggatcagaccaaagatggattaatatcttttcaagaatttgttgcctttgaatctgtcctgtgtgcccctgatgctttgtttatggtagcctttcagctgtttgacaaagctggcaaaggagaagtaacttttgaggatgttaagcaagtttttggacagaccacaattcatcaacatattccatttaactgggattcagaatttgtgcaactacattttggaaaagaaagaaaaagacacctgacatatgcggaatttactcagtttttattggaaatacaactggagcacgcaaagcaagcctttgtgcaacgggacaatgctaggactgggagagtcacagccatcgacttccgagacatcatggtcaccatccgcccccatgtcttgactccttttgtagaagaatgtctagtagctgctgctggaggtaccacatcccatcaagttagtttctcctattttaatggatttaattcgctccttaacaacatggaactcattagaaagatctatagcactctggctggcaccaggaaagatgttgaagtgactaaggaggagtttgttctggcagctcagaaatttggtcaggttacacccatggaagttgacatcttgtttcagttagcagatttatatgagccaaggggacgtatgaccttagcagacattgaacggattgctcctctggaagagggaactctgccctttaacttggctgaggcccagaggcagaaggcctcaggtgattcagctcgaccagttcttctacaagttgcagagtcggcctacaggtttggtctgggttctgttgctggagctgttggagccactgctgtgtatcctatcgatcttgtaaaaactcgaatgcagaaccaacgatcaactggctcttttgtgggagaactcatgtataaaaacagctttgactgttttaagaaagtgctacgctatgaaggcttctttggactgtatagaggtctgttgccacagttattgggagttgccccagagaaggccataaaacttacagtgaacgattttgtgagggataaatttatgcacaaagatggttcggtcccacttgcagcagaaattcttgctggaggctgcgctggaggctcccaggtgattttcacaaatcctttagaaatcgtcaagatccgtttgcaagtggcaggagaaatcaccactggtcctcgagtcagtgctctgtctgtcgtgcgggacctggggttttttgggatctacaagggtgccaaagcatgctttctgcgggacattcctttctcggccatctactttccgtgctatgctcatgtgaaggcttcctttgcaaatgaagatgggcaggttagcccaggaagcctgctcttagctggtgccatagctggtatgcctgcagcatctttagtgacccctgctgatgttatcaagacgagattacaggtggctgcccgggctggccaaaccacttacagcggagtgatagactgctttagaaagatactgcgtgaagaaggaccaaaagctctgtggaagggagctggtgctcgtgtatttcgatcctcaccccagtttggtgtaactttgctgacttacgaattgctacagcgatggttctacattgattttggaggagtaaaacccatgggatcagagccagttcctaaatccaggatcaacctgcctgccccgaatcctgatcacgttgggggctacaaactggcagttgctacatttgcagggattgaaaacaaatttggactttacctacctctcttcaagccatcagtatctacctcaaaggctattggtggaggccca

SEQ ID NO: 452 - protein, 676 aa, Homo sapiens
  source 1..676: note = citrin wt, isoform 2
MAAAKVALTKRADPAELRTIFLKYASIEKNGEFFMSPNDFVTRYLNIFGESQPNPKTVELLSGVVDQTKDGLISFQEFVAFESVLCAPDALFMVAFQLFDKAGKGEVTFEDVKQVFGQTTIHQHIPFNWDSEFVQLHFGKERKRHLTYAEFTQFLLEIQLEHAKQAFVQRDNARTGRVTAIDFRDIMVTIRPHVLTPFVEECLVAAAGGTTSHQVSFSYFNGFNSLLNNMELIRKIYSTLAGTRKDVEVTKEEFVLAAQKFGQVTPMEVDILFQLADLYEPRGRMTLADIERIAPLEEGTLPFNLAEAQRQQKASGDSARPVLLQVAESAYRFGLGSVAGAVGATAVYPIDLVKTRMQNQRSTGSFVGELMYKNSFDCFKKVLRYEGFFGLYRGLLPQLLGVAPEKAIKLTVNDFVRDKFMHKDGSVPLAAEILAGGCAGGSQVIFTNPLEIVKIRLQVAGEITTGPRVSALSVVRDLGFFGIYKGAKACFLRDIPFSAIYFPCYAHVKASFANEDGQVSPGSLLLAGAIAGMPAASLVTPADVIKTRLQVAARAGQTTYSGVIDCFRKILREEGPKALWKGAGARVFRSSPQFGVTLLTYELLQRWFYIDFGGVKPMGSEPVPKSRINLPAPNPDHVGGYKLAVATFAGIENKFGLYLPLFKPSVSTSKAIGGGP

SEQ ID NO: 453 - DNA, 2028 bp, Homo sapiens
  source 1..2028: mol_type = genomic DNA; note = citrin wt, isoform 2
atggcggccgccaaggtggctttaaccaagagagcagatccagctgagcttagaacaatatttttgaagtatgcaagcattgagaaaaacggtgaatttttcatgtcccccaatgactttgtcactcgatacttgaacatttttggagaaagccagcctaatccaaagactgtggaacttttaagtggagtggtggatcagaccaaagatggattaatatcttttcaagaatttgttgcctttgaatctgtcctgtgtgcccctgatgctttgtttatggtagcctttcagctgtttgacaaagctggcaaaggagaagtaacttttgaggatgttaagcaagtttttggacagaccacaattcatcaacatattccatttaactgggattcagaatttgtgcaactacattttggaaaagaaagaaaaagacacctgacatatgcggaatttactcagtttttattggaaatacaactggagcacgcaaagcaagcctttgtgcaacgggacaatgctaggactgggagagtcacagccatcgacttccgagacatcatggtcaccatccgcccccatgtcttgactccttttgtagaagaatgtctagtagctgctgctggaggtaccacatcccatcaagttagtttctcctattttaatggatttaattcgctccttaacaacatggaactcattagaaagatctatagcactctggctggcaccaggaaagatgttgaagtgactaaggaggagtttgttctggcagctcagaaatttggtcaggttacacccatggaagttgacatcttgtttcagttagcagatttatatgagccaaggggacgtatgaccttagcagacattgaacggattgctcctctggaagagggaactctgccctttaacttggctgaggcccagaggcagcagaaggcctcaggtgattcagctcgaccagttcttctacaagttgcagagtcggcctacaggtttggtctgggttctgttgctggagctgttggagccactgctgtgtatcctatcgatcttgtaaaaactcgaatgcagaaccaacgatcaactggctcttttgtgggagaactcatgtataaaaacagctttgactgttttaagaaagtgctacgctatgaaggcttctttggactgtatagaggtctgttgccacagttattgggagttgccccagagaaggccataaaacttacagtgaacgattttgtgagggataaatttatgcacaaagatggttcggtcccacttgcagcagaaattcttgctggaggctgcgctggaggctcccaggtgattttcacaaatcctttagaaatcgtcaagatccgtttgcaagtggcaggagaaatcaccactggtcctcgagtcagtgctctgtctgtcgtgcgggacctggggttttttgggatctacaagggtgccaaagcatgctttctgcgggacattcctttctcggccatctactttccgtgctatgctcatgtgaaggcttcctttgcaaatgaagatgggcaggttagcccaggaagcctgctcttagctggtgccatagctggtatgcctgcagcatctttagtgacccctgctgatgttatcaagacgagattacaggtggctgcccgggctggccaaaccacttacagcggagtgatagactgctttagaaagatactgcgtgaagaaggaccaaaagctctgtggaagggagctggtgctcgtgtatttcgatcctcaccccagtttggtgtaactttgctgacttacgaattgctacagcgatggttctacattgattttggaggagtaaaacccatgggatcagagccagttcctaaatccaggatcaacctgcctgccccgaatcctgatcacgttgggggctacaaactggcagttgctacatttgcagggattgaaaacaaatttggactttacctacctctcttcaagccatcagtatctacctcaaaggctattggtggaggccca

SEQ ID NO: 454 - protein, 727 aa, Homo sapiens
  source 1..727: note = glycerol-3-phosphate dehydrogenase wt
MAFQKAVKGTILVGGGALATVLGLSQFAHYRRKQMNLAYVKAADCISEPVNREPPSREAQLLTLQNTSEFDILVIGGGATGSGCALDAVTRGLKTALVERDDFSSGTSSRSTKLIHGGVRYLQKAIMKLDIEQYRMVKEALHERANLLEIAPHLSAPLPIMLPVYKWWQLPYYWVGIKLYDLVAGSNCLKSSYVLSKSRALEHFPMLQKDKLVGAIVYYDGQHNDARMNLAIALTAARYGAATANYMEVVSLLKKTDPQTGKVRVSGARCKDVLTGQEFDVRAKCVINATGPFTDSVRKMDDKDAAAICQPSAGVHIVMPGYYSPESMGLLDPATSDGRVIFFLPWQKMTIAGTTDTPTDVTHHPIPSEEDINFILNEVRNYLSCDVEVRRGDVLAAWSGIRPLVTDPKSADTQSISRNHVVDISESGLITIAGGKWTTYRSMAEDTINAAVKTHNLKAGPSRTVGLFLQGGKDWSPTLYIRLVQDYGLESEVAQHLAATYGDKAFEVAKMASVTGKRWPIVGVRLVSEFPYIEAEVKYGIKEYACTAVDMISRRTRLAFLNVQAAEEALPRIVELMGRELNWDDYKKQEQLETARKFLYYEMGYKSRSEQLTDRSEISLLPSDIDRYKKRFHKFDADQKGFITIVDVQRVLESINVQMDENTLHEILNEVDLNKNGQVELNEFLQLMSAIQKGRVSGSRLAILMKTAEENLDRRVPIPVDRSCGGL

SEQ ID NO: 455 - DNA, 2181 bp, Homo sapiens
  source 1..2181: mol_type = genomic DNA; note = glycerol-3-phosphate dehydrogenase wt
atggcatttcaaaaggcagtgaaagggacgattcttgttggaggaggtgctcttgcaactgttttaggactttctcagtttgctcattacagaaggaaacaaatgaacctggcctatgttaaagcagcagactgcatttcagaaccagttaacagggagcctccttccagagaagctcagctactgactttgcaaaacacatctgaatttgatatccttgttattggaggaggagcaacaggaagtggctgtgcgctagatgctgtcaccagaggactaaaaacagcccttgtagaaagagatgatttctcatcagggaccagcagcagaagcactaaattgatccatggtggtgtgagatatctgcagaaggccatcatgaagttggatattgagcagtataggatggtaaaagaagcccttcatgagcgtgccaacctgctagaaattgctccccatttatcagctccattgcctataatgcttccagtttacaagtggtggcagttaccttactactgggtaggaatcaagctgtatgatttggttgcaggaagcaattgcctaaaaagcagttatgtcctcagcaaatcaagagcccttgaacatttcccaatgctccagaaggacaaactggtaggagcaattgtctactatgacggacaacataacgatgcacggatgaaccttgccattgctctgactgctgccaggtatggggctgccacagccaattacatggaggtagtgagcttgctcaagaagacagacccccagacagggaaagtgcgtgtgagcggcgcacggtgcaaggatgtcctcacagggcaggaatttgacgtgagagccaaatgtgttatcaatgccacgggacctttcacggactctgtgcgcaaaatggatgataaagacgcagcagctatctgccagccaagtgctggtgtccatattgtgatgcctggttattacagcccagagagcatgggacttcttgacccagcgaccagtgatgggcgagttattttcttcttaccctggcaaaagatgacgatcgctggcactactgatactccaactgatgttacacaccatccaattccttcagaagaagatatcaacttcattttgaatgaagtgcgtaattacctgagttgtgatgttgaagtgagaagaggggatgtcctggcagcatggagtggaatccgtcctcttgttacagaccccaaatctgcagatactcagtctatctcccgaaatcatgttgttgatatcagtgagagtggccttattactatagcaggtggaaagtggacaacttatcggtctatggcagaagataccataaatgctgctgtcaaaactcataatttaaaagcaggaccaagtagaacagttgggcttttccttcaagggggtaaagattggagccccacactctacattaggcttgtgcaggattatggacttgaaagcgaggtggcacagcatcttgccgccacctatggtgataaggcctttgaggtggccaaaatggcaagtgtgactggcaaaaggtggcctattgttggagtacgtcttgtgtcagaatttccatatattgaagcagaggtgaaatatgggattaaggagtatgcctgcactgctgtggatatgatttcacgtcgtactcgcctggcctttctaaatgtccaggcagcagaggaagccctacccaggattgttgaactgatgggcagggaactgaattgggatgattataagaagcaggaacaacttgaaacagccaggaagtttctatattatgaaatgggctataaatctcgatcagaacagttaacagatcgctctgaaattagcctactgccttcagacattgacaggtataagaagagatttcataagtttgatgcagaccagaaaggctttattaccattgttgatgttcagcgtgtattagagagtatcaatgtccaaatggatgaaaatacactccatgaaattctaaatgaagttgatttgaataaaaatggacaggttgaactcaatgaatttttgcagctgatgagtgctattcaaaaaggaagggtatctggaagccggcttgctatactaatgaaaactgcagaagagaacctcgacagaagagttccaattccagtggaccgtagttgtggaggattg

SEQ ID NO: 456 - protein, 224 aa, Homo sapiens
  source 1..224: note = retinoschisin 1 wt
MSRKIEGFLLLLLFGYEATLGLSSTEDEGEDPWYQKACKCDCQGGPNALWSAGATSLDCIPECPYHKPLGFESGEVTPDQITCSNPEQYVGWYSSWTANKARLNSQGFGCAWLSKFQDSSQWLQIDLKEIKVISGILTQGRCDIDEWMTKYSVQYRTDERLNWIYYKDQTGNNRVFYGNSDRTSTVQNLLRPPIISRFIRLIPLGWHVRIAIRMELLECVSKCA

SEQ ID NO: 457 - DNA, 672 bp, Homo sapiens
  source 1..672: mol_type = genomic DNA; note = retinoschisin 1 wt
atgtcacgcaagatagaaggctttttgttattacttctctttggctatgaagccacattgggattatcgtctaccgaggatgaaggcgaggacccctggtaccaaaaagcatgcaagtgcgattgccaaggaggacccaatgctctgtggtctgcaggtgccacctccttggactgtataccagaatgcccatatcacaagcctctgggtttcgagtcaggggaggtcacaccggaccagatcacctgctctaacccggagcagtatgtgggctggtattcttcgtggactgcaaacaaggcccggctcaacagtcaaggctttgggtgtgcctggctctccaagttccaggacagtagccagtggttacagatagatctgaaggagatcaaagtgatttcagggatcctcacccaggggcgctgtgacatcgatgagtggatgaccaagtacagcgtgcagtacaggaccgatgagcgcctgaactggatttactacaaggaccagactggaaacaaccgggtcttctatggcaactcggaccgcacctccacggttcagaacctgctgcggccccccatcatctcccgcttcatccgcctcatcccgctgggctggcacgtccgcattgccatccggatggagctgctggagtgcgtcagcaagtgtgcc

SEQ ID NO: 458 - protein, 224 aa, Homo sapiens
  source 1..224: note = retinoschisin 1 W96R
MSRKIEGFLLLLLFGYEATLGLSSTEDEGEDPWYQKACKCDCQGGPNALWSAGATSLDCIPECPYHKPLGFESGEVTPDQITCSNPEQYVGWYSSRTANKARLNSQGFGCAWLSKFQDSSQWLQIDLKEIKVISGILTQGRCDIDEWMTKYSVQYRTDERLNWIYYKDQTGNNRVFYGNSDRTSTVQNLLRPPIISRFIRLIPLGWHVRIAIRMELLECVSKCA

SEQ ID NO: 459 - DNA, 672 bp, Homo sapiens
  source 1..672: mol_type = genomic DNA; note = retinoschisin 1 W96R
atgtcacgcaagatagaaggctttttgttattacttctctttggctatgaagccacattgggattatcgtctaccgaggatgaaggcgaggacccctggtaccaaaaagcatgcaagtgcgattgccaaggaggacccaatgctctgtggtctgcaggtgccacctccttggactgtataccagaatgcccatatcacaagcctctgggtttcgagtcaggggaggtcacaccggaccagatcacctgctctaacccggagcagtatgtgggctggtattcttcgcggactgcaaacaaggcccggctcaacagtcaaggctttgggtgtgcctggctctccaagttccaggacagtagccagtggttacagatagatctgaaggagatcaaagtgatttcagggatcctcacccaggggcgctgtgacatcgatgagtggatgaccaagtacagcgtgcagtacaggaccgatgagcgcctgaactggatttactacaaggaccagactggaaacaaccgggtcttctatggcaactcggaccgcacctccacggttcagaacctgctgcggccccccatcatctcccgcttcatccgcctcatcccgctgggctggcacgtccgcattgccatccggatggagctgctggagtgcgtcagcaagtgtgcc

SEQ ID NO: 460 - protein, 752 aa, Homo sapiens
  source 1..752: note = complement component C2 wt
MGPLMVLFCLLFLYPGLADSAPSCPQNVNISGGTFTLSHGWAPGSLLTYSCPQGLYPSPASRLCKSSGQWQTPGATRSLSKAVCKPVRCPAPVSFENGIYTPRLGSYPVGGNVSFECEDGFILRGSPVRQCRPNGMWDGETAVCDNGAGHCPNPGISLGAVRTGFRFGHGDKVRYRCSSNLVLTGSSERECQGNGVWSGTEPICRQPYSYDFPEDVAPALGTSFSHMLGATNPTQKTKESLGRKIQIQRSGHLNLYLLLDCSQSVSENDFLIFKESASLMVDRIFSFEINVSVAIITFASEPKVLMSVLNDNSRDMTEVISSLENANYKDHENGTGTNTYAALNSVYLMMNNQMRLLGMETMAWQEIRHAIILLTDGKSNMGGSPKTAVDHIREILNINQKRNDYLDIYAIGVGKLDVDWRELNELGSKKDGERHAFILQDTKALHQVFEHMLDVSKLTDTICGVGNMSANASDQERTPWHVTIKPKSQETCRGALISDQWVLTAAHCFRDGNDHSLWRVNVGDPKSQWGKEFLIEKAVISPGFDVFAKKNQGILEFYGDDIALLKLAQKVKMSTHARPICLPCTMEANLALRRPQGSTCRDHENELLNKQSVPAHFVALNGSKLNINLKMGVEWTSCAEVVSQEKTMFPNLTDVREVVTDQFLCSGTQEDESPCKGESGGAVFLERRFRFFQVGLVSWGLYNPCLGSADKNSRKRAPRSKVPPPRDFHINLFRMQPWLRQHLGDVLNFLPL

SEQ ID NO: 461 - DNA, 2256 bp, Homo sapiens
  source 1..2256: mol_type = genomic DNA; note = complement component C2 wt
atgggcccactgatggttcttttttgcctgctgttcctgtacccaggtctggcagactcggctccctcctgccctcagaacgtgaatatctcgggtggcaccttcaccctcagccatggctgggctcctgggagccttctcacctactcctgcccccagggcctgtacccatccccagcatcacggctgtgcaagagcagcggacagtggcagaccccaggagccacccggtctctgtctaaggcggtctgcaaacctgtgcgctgtccagcccctgtctcctttgagaatggcatttataccccacggctggggtcctatcccgtgggtggcaatgtgagcttcgagtgtgaggatggcttcatattgcggggctcgcctgtgcgtcagtgtcgccccaacggcatgtgggatggagaaacagctgtgtgtgataatggggctggccactgccccaacccaggcatttcactgggcgcagtgcggacaggcttccgctttggtcatggggacaaggtccgctatcgctgctcctcgaatcttgtgctcacggggtcttcggagcgggagtgccagggcaacggggtctggagtggaacggagcccatctgccgccaaccctactcttatgacttccctgaggacgtggcccctgccctgggcacttccttctcccacatgcttggggccaccaatcccacccagaagacaaaggaaagcctgggccgtaaaatccaaatccagcgctctggtcatctgaacctctacctgctcctggactgttcgcagagtgtgtcggaaaatgactttctcatcttcaaggagagcgcctccctcatggtggacaggatcttcagctttgagatcaatgtgagcgttgccattatcacctttgcctcagagcccaaagtcctcatgtctgtcctgaacgacaactcccgggatatgactgaggtgatcagcagcctggaaaatgccaactataaagatcatgaaaatggaactgggactaacacctatgcggccttaaacagtgtctatctcatgatgaacaaccaaatgcgactcctcggcatggaaacgatggcctggcaggaaatccgacatgccatcatccttctgacagatggaaagtccaatatgggtggctctcccaagacagctgttgaccatatcagagagatcctgaacatcaaccagaagaggaatgactatctggacatctatgccatcggggtgggcaagctggatgtggactggagagaactgaatgagctagggtccaagaaggatggtgagaggcatgccttcattctgcaggacacaaaggctctgcaccaggtctttgaacatatgctggatgtctccaagctcacagacaccatctgcggggtggggaacatgtcagcaaacgcctctgaccaggagaggacaccctggcatgtcactattaagcccaagagccaagagacctgccggggggccctcatctccgaccaatgggtcctgacagcagctcattgcttccgcgatggcaacgaccactccctgtggagggtcaatgtgggagaccccaaatcccagtggggcaaagaattccttattgagaaggcggtgatctccccagggtttgatgtctttgccaaaaagaaccagggaatcctggagttctatggtgatgacatagctctgctgaagctggcccagaaagtaaagatgtccacccatgccaggcccatctgccttccctgcacgatggaggccaatctggctctgcggagacctcaaggcagcacctgtagggaccatgagaatgaactgctgaacaaacagagtgttcctgctcattttgtcgccttgaatgggagcaaactgaacattaaccttaagatgggagtggagtggacaagctgtgccgaggttgtctcccaagaaaaaaccatgttccccaacttgacagatgtcagggaggtggtgacagaccagttcctatgcagtgggacccaggaggatgagagtccctgcaagggagaatctgggggagcagttttccttgagcggagattcaggttttttcaggtgggtctggtgagctggggtctttacaacccctgccttggctctgctgacaaaaactcccgcaaaagggcccctcgtagcaaggtcccgccgccacgagactttcacatcaatctcttccgcatgcagccctggctgaggcagcacctgggggatgtcctgaattttttacccctc

SEQ ID NO: 462 - protein, 1218 aa, Homo sapiens
  source 1..1218: note = Jagged-1 wt
MRSPRTRGRSGRPLSLLLALLCALRAKVCGASGQFELEILSMQNVNGELQNGNCCGGARNPGDRKCTRDECDTYFKVCLKEYQSRVTAGGPCSFGSGSTPVIGGNTFNLKASRGNDRNRIVLPFSFAWPRSYTLLVEAWDSSNDTVQPDSIIEKASHSGMINPSRQWQTLKQNTGVAHFEYQIRVTCDDYYYGFGCNKFCRPRDDFFGHYACDQNGNKTCMEGWMGPECNRAICRQGCSPKHGSCKLPGDCRCQYGWQGLYCDKCIPHPGCVHGICNEPWQCLCETNWGGQLCDKDLNYCGTHQPCLNGGTCSNTGPDKYQCSCPEGYSGPNCEIAEHACLSDPCHNRGSCKETSLGFECECSPGWTGPTCSTNIDDCSPNNCSHGGTCQDLVNGFKCVCPPQWTGKTCQLDANECEAKPCVNAKSCKNLIASYYCDCLPGWMGQNCDININDCLGQCQNDASCRDLVNGYRCICPPGYAGDHCERDIDECASNPCLNGGHCQNEINRFQCLCPTGFSGNLCQLDIDYCEPNPCQNGAQCYNRASDYFCKCPEDYEGKNCSHLKDHCRTTPCEVIDSCTVAMASNDTPEGVRYISSNVCGPHGKCKSQSGGKFTCDCNKGFTGTYCHENINDCESNPCRNGGTCIDGVNSYKCICSDGWEGAYCETNINDCSQNPCHNGGTCRDLVNDFYCDCKNGWKGKTCHSRDSQCDEATCNNGGTCYDEGDAFKCMCPGGWEGTTCNIARNSSCLPNPCHNGGTCVVNGESFTCVCKEGWEGPICAQNTNDCSPHPCYNSGTCVDGDNWYRCECAPGFAGPDCRININECQSSPCAFGATCVDEINGYRCVCPPGHSGAKCQEVSGRPCITMGSVIPDGAKWDDDCNTCQCLNGRIACSKVWCGPRPCLLHKGHSECPSGQSCIPILDDQCFVHPCTGVGECRSSSLQPVKTKCTSDSYYQDNCANITFTFNKEMMSPGLTTEHICSELRNLNILKNVSAEYSIYIACEPSPSANNEIHVAISAEDIRDDGNPIKEITDKIIDLVSKRDGNSSLIAAVAEVRVQRRPLKNRTDFLVPLLSSVLTVAWICCLVTAFYWCLRKRRKPGSHTHSASEDNTTNNVREQLNQIKNPIEKHGANTVPIKDYENKNSKMSKIRTHNSEVEEDDMDKHQQKARFAKQPAYTLVDREEKPPNGTPTKHPNWTNKQDNRDLESAQSLNRMEYIV

SEQ ID NO: 463 - DNA, 3654 bp, Homo sapiens
  source 1..3654: mol_type = genomic DNA; note = Jagged-1 wt
atgcgttccccacggacgcgcggccggtccgggcgccccctaagcctcctgctcgccctgctctgtgccctgcgagccaaggtgtgtggggcctcgggtcagttcgagttggagatcctgtccatgcagaacgtgaacggggagctgcagaacgggaactgctgcggcggcgcccggaacccgggagaccgcaagtgcacccgcgacgagtgtgacacatacttcaaagtgtgcctcaaggagtatcagtcccgcgtcacggccggggggccctgcagcttcggctcagggtccacgcctgtcatcgggggcaacaccttcaacctcaaggccagccgcggcaacgaccgcaaccgcatcgtgctgcctttcagtttcgcctggccgaggtcctatacgttgcttgtggaggcgtgggattccagtaatgacaccgttcaacctgacagtattattgaaaaggcttctcactcgggcatgatcaaccccagccggcagtggcagacgctgaagcagaacacgggcgttgcccactttgagtatcagatccgcgtgacctgtgatgactactactatggctttggctgcaataagttctgccgccccagagatgacttctttggacactatgcctgtgaccagaatggcaacaaaacttgcatggaaggctggatgggccccgaatgtaacagagctatttgccgacaaggctgcagtcctaagcatgggtcttgcaaactcccaggtgactgcaggtgccagtacggctggcaaggcctgtactgtgataagtgcatcccacacccgggatgcgtccacggcatctgtaatgagccctggcagtgcctctgtgagaccaactggggcggccagctctgtgacaaagatctcaattactgtgggactcatcagccgtgtctcaacgggggaacttgtagcaacacaggccctgacaaatatcagtgttcctgccctgaggggtattcaggacccaactgtgaaattgctgagcacgcctgcctctctgatccctgtcacaacagaggcagctgtaaggagacctccctgggctttgagtgtgagtgttccccaggctggaccggccccacatgctctacaaacattgatgactgttctcctaataactgttcccacgggggcacctgccaggacctggttaacggatttaagtgtgtgtgccccccacagtggactgggaaaacgtgccagttagatgcaaatgaatgtgaggccaaaccttgtgtaaacgccaaatcctgtaagaatctcattgccagctactactgcgactgtcttcccggctggatgggtcagaattgtgacataaatattaatgactgccttggccagtgtcagaatgacgcctcctgtcgggatttggttaatggttatcgctgtatctgtccacctggctatgcaggcgatcactgtgagagagacatcgatgaatgtgccagcaacccctgtttgaatgggggtcactgtcagaatgaaatcaacagattccagtgtctgtgtcccactggtttctctggaaacctctgtcagctggacatcgattattgtgagcctaatccctgccagaacggtgcccagtgctacaaccgtgccagtgactatttctgcaagtgccccgaggactatgagggcaagaactgctcacacctgaaagaccactgccgcacgaccccctgtgaagtgattgacagctgcacagtggccatggcttccaacgacacacctgaaggggtgcggtatatttcctccaacgtctgtggtcctcacgggaagtgcaagagtcagtcgggaggcaaattcacctgtgactgtaacaaaggcttcacgggaacatactgccatgaaaatattaatgactgtgagagcaacccttgtagaaacggtggcacttgcatcgatggtgtcaactcctacaagtgcatctgtagtgacggctgggagggggcctactgtgaaaccaatattaatgactgcagccagaacccctgccacaatgggggcacgtgtcgcgacctggtcaatgacttctactgtgactgtaaaaatgggtggaaaggaaagacctgccactcacgtgacagtcagtgtgatgaggccacgtgcaacaacggtggcacctgctatgatgagggggatgcttttaagtgcatgtgtcctggcggctgggaaggaacaacctgtaacatagcccgaaacagtagctgcctgcccaacccctgccataatgggggcacatgtgtggtcaacggcgagtcctttacgtgcgtctgcaaggaaggctgggaggggcccatctgtgctcagaataccaatgactgcagccctcatccctgttacaacagcggcacctgtgtggatggagacaactggtaccggtgcgaatgtgccccgggttttgctgggcccgactgcagaataaacatcaatgaatgccagtcttcaccttgtgcctttggagcgacctgtgtggatgagatcaatggctaccggtgtgtctgccctccagggcacagtggtgccaagtgccaggaagtttcagggagaccttgcatcaccatggggagtgtgataccagatggggccaaatgggatgatgactgtaatacctgccagtgcctgaatggacggatcgcctgctcaaaggtctggtgtggccctcgaccttgcctgctccacaaagggcacagcgagtgccccagcgggcagagctgcatccccatcctggacgaccagtgcttcgtccacccctgcactggtgtgggcgagtgtcggtcttccagtctccagccggtgaagacaaagtgcacctctgactcctattaccaggataactgtgcgaacatcacatttacctttaacaaggagatgatgtcaccaggtcttactacggagcacatttgcagtgaattgaggaatttgaatattttgaagaatgtttccgctgaatattcaatctacatcgcttgcgagccttccccttcagcgaacaatgaaatacatgtggccatttctgctgaagatatacgggatgatgggaacccgatcaaggaaatcactgacaaaataatcgatcttgttagtaaacgtgatggaaacagctcgctgattgctgccgttgcagaagtaagagttcagaggcggcctctgaagaacagaacagatttccttgttcccttgctgagctctgtcttaactgtggcttggatctgttgcttggtgacggccttctactggtgcctgcggaagcggcggaagccgggcagccacacacactcagcctctgaggacaacaccaccaacaacgtgcgggagcagctgaaccagatcaaaaaccccattgagaaacatggggccaacacggtccccatcaaggattatgagaacaagaactccaaaatgtctaaaataaggacacacaattctgaagtagaagaggacgacatggacaaacaccagcagaaagcccggtttgccaagcagccggcgtacacgctggtagacagagaagagaagccccccaacggcacgccgacaaaacacccaaactggacaaacaaacaggacaacagagacttggaaagtgcccagagcttaaaccgaatggagtacatcgta

SEQ ID NO: 464 - protein, 1054 aa, Homo sapiens
  source 1..1054: note = Jagged-1 1-1054
MRSPRTRGRSGRPLSLLLALLCALRAKVCGASGQFELEILSMQNVNGELQNGNCCGGARNPGDRKCTRDECDTYFKVCLKEYQSRVTAGGPCSFGSGSTPVIGGNTFNLKASRGNDRNRIVLPFSFAWPRSYTLLVEAWDSSNDTVQPDSIIEKASHSGMINPSRQWQTLKQNTGVAHFEYQIRVTCDDYYYGFGCNKFCRPRDDFFGHYACDQNGNKTCMEGWMGPECNRAICRQGCSPKHGSCKLPGDCRCQYGWQGLYCDKCIPHPGCVHGICNEPWQCLCETNWGGQLCDKDLNYCGTHQPCLNGGTCSNTGPDKYQCSCPEGYSGPNCEIAEHACLSDPCHNRGSCKETSLGFECECSPGWTGPTCSTNIDDCSPNNCSHGGTCQDLVNGFKCVCPPQWTGKTCQLDANECEAKPCVNAKSCKNLIASYYCDCLPGWMGQNCDININDCLGQCQNDASCRDLVNGYRCICPPGYAGDHCERDIDECASNPCLNGGHCQNEINRFQCLCPTGFSGNLCQLDIDYCEPNPCQNGAQCYNRASDYFCKCPEDYEGKNCSHLKDHCRTTPCEVIDSCTVAMASNDTPEGVRYISSNVCGPHGKCKSQSGGKFTCDCNKGFTGTYCHENINDCESNPCRNGGTCIDGVNSYKCICSDGWEGAYCETNINDCSQNPCHNGGTCRDLVNDFYCDCKNGWKGKTCHSRDSQCDEATCNNGGTCYDEGDAFKCMCPGGWEGTTCNIARNSSCLPNPCHNGGTCVVNGESFTCVCKEGWEGPICAQNTNDCSPHPCYNSGTCVDGDNWYRCECAPGFAGPDCRININECQSSPCAFGATCVDEINGYRCVCPPGHSGAKCQEVSGRPCITMGSVIPDGAKWDDDCNTCQCLNGRIACSKVWCGPRPCLLHKGHSECPSGQSCIPILDDQCFVHPCTGVGECRSSSLQPVKTKCTSDSYYQDNCANITFTFNKEMMSPGLTTEHICSELRNLNILKNVSAEYSIYIACEPSPSANNEIHVAISAEDIRDDGNPIKEITDKIIDLVSKRDGNSSLIAAVAE

SEQ ID NO: 465 - DNA, 3162 bp, Homo sapiens
  source 1..3162: mol_type = genomic DNA; note = Jagged-1 1-1054
atgagaagtccacggacgcgcggccgctcagggcgtccattgtccctcctgctcgccctgctctgcgccctccgagccaaggtctgtggtgccagtggtcagttcgagttggagatcctgtccatgcagaatgtgaacggggaactgcagaatgggaactgctgcggcggcgcccggaatccgggagaccgaaaatgcacacgcgacgaatgcgacacgtacttcaaagtctgtctcaaggaataccaatcacgcgttacggccggggggccctgtagcttcggatcagggtccacccctgttatcgggggtaacaccttcaaccttaaggccagcaggggcaacgaccgcaaccgcatcgtgctgcctttctcgtttgcctggccgaggtcctatacgttgcttgtggaggcgtgggattcttctaatgataccgttcagcctgacagcattattgaaaaggcttctcacagcggcatgatcaatcccagccggcaatggcaaacgctgaagcaaaacacgggggtggcccactttgagtatcaaatccgcgtgacatgcgatgactactactacggcttcggatgtaataagttctgccgccctagagacgatttctttggccactatgcctgtgatcagaatggcaacaaaacttgtatggagggctggatggggcccgaatgtaacagagcaatttgtcgacagggctgtagtcctaagcacgggtcttgcaaactcccaggtgattgtaggtgtcagtacggttggcaaggcctgtattgtgataagtgtattccacatcccggatgcgtccacggtatctgcaacgagccctggcaatgtctctgtgagacaaattgggggggccagctttgcgacaaagatctcaattattgcggtacgcatcaaccgtgccttaatgggggaacttgcagcaatacaggacctgataagtaccagtgctcctgccctgaggggtattcaggacccaactgtgagattgccgagcacgcttgcttgtcagatccctgccacaatcgaggctcatgtaaggagacaagcctgggctttgaatgtgagtgttctccaggctggaccggacccacatgctcaacaaacattgatgattgttctcctaacaactgttctcatggcgggacctgccaagacctggttaacggttttaagtgtgtatgcccaccccagtggactgggaagacgtgccaactagatgcgaacgaatgcgaagccaaaccctgtgtgaacgccaaatcctgtaagaatttaattgctagctactactgcgattgccttcctggctggatgggtcagaattgtgacataaatattaatgactgcttgggccagtgtcagaatgacgcctcttgccgggatttggtgaatggttatcgctgtatctgtccaccgggctatgcaggcgatcactgcgagagagatattgatgagtgtgccagcaatccctgtttgaatgggggtcactgccagaacgaaattaacagattccagtgcctgtgtcccacgggtttttctggaaacctctgtcagctggatatcgactattgtgagcctaacccctgccagaatggtgcgcaatgctacaatagggcgagtgactacttctgtaagtgtcccgaagattatgagggaaagaactgctcacacctgaaggaccactgcagaacaaccccctgtgaagtgatagatagctgcacagttgcgatggcttccaatgatacaccagagggggtgcggtatatttcttccaacgtctgcggtccacacggcaagtgcaagagtcaatcgggaggaaaattcacctgcgactgtaacaagggcttcaccggaacctactgccatgagaatatcaatgattgcgagagcaacccatgcaggaacggtgggacctgcatcgacggggtcaactcctacaaatgcatctgcagtgacggctgggaaggggcctactgtgaaaccaacattaatgactgcagccagaacccttgtcataatgggggcacgtgtcgcgacctagtcaacgacttctattgtgactgtaaaaatgggtggaaaggaaagacatgccacagccgtgatagccagtgtgatgaggcaacgtgcaacaacggtggcacttgctatgatgagggggatgcttttaagtgcatgtgtcctggcggctgggaaggaactacatgcaatatcgcccgaaacagtagctgcctgcctaatccctgccataacgggggaacatgtgtggttaacggcgagtccttcacgtgcgtttgtaaagaaggctgggagggccctatatgtgctcagaataccaatgactgcagcccgcatccctgttacaatagcggcacctgtgttgacggtgacaattggtatcggtgcgaatgtgcgccgggtttcgcaggtccagactgcagaataaatatcaatgaatgccaaagctcaccgtgcgcctttggagcgacctgtgtggatgaaatcaacggctatcggtgtgtctgccctcccgggcatagtggtgccaaatgccaggaagtgtccggcagaccttgcatcaccatggggagtgtgataccggatggcgctaaatgggatgatgattgtaatacctgtcagtgcctgaacggacggatcgcttgttcaaaggtctggtgtggccctcgaccatgcttgttacataagggacactccgagtgccccagcggtcagtcgtgtatccctattctggacgaccagtgcttcgtccatccctgtactggtgtgggcgagtgtaggtctagcagtctccagccggttaagacaaaatgcaccagtgactcctattaccaagataactgtgcgaacatcacatttacctttaataaagagatgatgtcaccaggtcttaccacggagcacatttgcagtgaattgaggaatttgaatattttgaagaatgtttccgctgaatattcaatctacatcgcttgcgagccttccccttcagcgaacaatgaaatacatgtggccatttctgctgaagatatacgggatgatgggaacccgatcaaggaaatcactgacaaaataatcgatcttgttagtaaacgtgatgggaacagctcgctgattgctgcagttgcagaa

SEQ ID NO: 466 - protein, 1046 aa, Homo sapiens
  source 1..1046: note = Jagged-1 1-1046
MRSPRTRGRSGRPLSLLLALLCALRAKVCGASGQFELEILSMQNVNGELQNGNCCGGARNPGDRKCTRDECDTYFKVCLKEYQSRVTAGGPCSFGSGSTPVIGGNTFNLKASRGNDRNRIVLPFSFAWPRSYTLLVEAWDSSNDTVQPDSIIEKASHSGMINPSRQWQTLKQNTGVAHFEYQIRVTCDDYYYGFGCNKFCRPRDDFFGHYACDQNGNKTCMEGWMGPECNRAICRQGCSPKHGSCKLPGDCRCQYGWQGLYCDKCIPHPGCVHGICNEPWQCLCETNWGGQLCDKDLNYCGTHQPCLNGGTCSNTGPDKYQCSCPEGYSGPNCEIAEHACLSDPCHNRGSCKETSLGFECECSPGWTGPTCSTNIDDCSPNNCSHGGTCQDLVNGFKCVCPPQWTGKTCQLDANECEAKPCVNAKSCKNLIASYYCDCLPGWMGQNCDININDCLGQCQNDASCRDLVNGYRCICPPGYAGDHCERDIDECASNPCLNGGHCQNEINRFQCLCPTGFSGNLCQLDIDYCEPNPCQNGAQCYNRASDYFCKCPEDYEGKNCSHLKDHCRTTPCEVIDSCTVAMASNDTPEGVRYISSNVCGPHGKCKSQSGGKFTCDCNKGFTGTYCHENINDCESNPCRNGGTCIDGVNSYKCICSDGWEGAYCETNINDCSQNPCHNGGTCRDLVNDFYCDCKNGWKGKTCHSRDSQCDEATCNNGGTCYDEGDAFKCMCPGGWEGTTCNIARNSSCLPNPCHNGGTCVVNGESFTCVCKEGWEGPICAQNTNDCSPHPCYNSGTCVDGDNWYRCECAPGFAGPDCRININECQSSPCAFGATCVDEINGYRCVCPPGHSGAKCQEVSGRPCITMGSVIPDGAKWDDDCNTCQCLNGRIACSKVWCGPRPCLLHKGHSECPSGQSCIPILDDQCFVHPCTGVGECRSSSLQPVKTKCTSDSYYQDNCANITFTFNKEMMSPGLTTEHICSELRNLNILKNVSAEYSIYIACEPSPSANNEIHVAISAEDIRDDGNPIKEITDKIIDLVSKRDGNS

SEQ ID NO: 467 - DNA, 3138 bp, Homo sapiens
  source 1..3138: mol_type = genomic DNA; note = Jagged-1 1-1046
atgaggtcacctcggacgagaggtcggagcgggcgacctttatctctcctcctagctctgctgtgcgcgctaagggcgaaagtgtgcggtgcgagcggtcaattcgaacttgaaattcttagtatgcaaaacgtaaatggcgaactgcaaaatgggaattgctgtggcggggcgcggaatcccggcgacagaaaatgcacgcgggatgagtgcgacacgtactttaaagtctgccttaaggagtaccaaagtagggtgacagcaggcgggccttgtagtttcggctcgggtagcacccctgtaattggcggtaataccttcaacttgaaggcctcacgcggcaatgacagaaatcgtatagttctgccctttagttttgcatggccgaggtcgtataccttgttggtagaggcgtgggactcatcgaacgacactgtccagcccgactcgatcattgaaaaggcctcgcacagtgggatgataaatcctagccggcagtggcaaacactcaagcagaacacgggcgtcgcgcactttgagtaccagataagagtaacatgtgatgattactattacggtttcggttgtaacaaattctgtcgtcctcgagacgacttctttggacattacgcatgtgaccaaaacggtaataagacatgtatggaaggctggatgggccccgagtgcaacagggcgatctgtagacagggttgttccccgaaacatggttcttgcaaactaccgggtgactgcaggtgtcaatatggttggcagggcctgtactgtgataaatgcataccgcatcctgggtgcgtccatggtatctgtaatgagccatggcagtgcctctgtgagacaaattggggtggccaactttgtgacaaggacctaaactattgtgggactcatcaaccgtgtctgaatgggggaacatgttcaaatactggtcctgacaagtatcagtgtagttgtccagaaggttactcggggccaaattgtgagatagcggaacatgcctgcctctcagacccgtgtcataatcggggctcttgcaaggaaacatccctagggtttgagtgcgagtgttctcctggttggacgggtccgacgtgctccacaaacatcgacgattgtagcccgaataactgttcccacgggggaacatgccaggatctagttaacggttttaagtgtgtttgtccgccccaatggaccggaaaaacctgtcagttggatgccaatgaatgtgaggccaaaccgtgcgtgaacgcgaaatcgtgtaagaatttgatcgcttcgtactactgtgattgtttgccgggatggatgggacaaaactgcgatataaatattaatgactgtttgggccaatgccaaaatgatgcatcctgtagggatcttgtaaacggatacaggtgcatatgtcctccaggctacgctggtgatcactgcgagagagatatagacgaatgtgcctcgaacccttgcctaaatggtggtcattgtcaaaatgagataaatcgattccagtgtctatgcccgaccggcttctcggggaatctttgtcagttagacatagattattgtgagcccaatccatgtcaaaacggcgcccagtgctacaatcgggctagcgattacttctgtaagtgcccggaggattacgaagggaagaattgctcacatttaaaagaccactgccgtacgacgccttgcgaagttattgactcctgcaccgtggccatggcctccaacgatacgcctgagggggtcaggtacatatctagtaacgtttgtggcccccatggaaagtgcaaatcccagtccggcgggaaattcacatgcgattgcaacaagggttttacgggtacttattgccacgagaacattaatgattgtgaaagcaacccatgtagaaatgggggtacctgtattgatggtgtcaacagttacaaatgtatttgtagcgatggctgggaaggcgcctactgcgagacaaatataaacgactgctcccagaacccctgccacaatgggggcacctgccgcgacttggtaaatgatttttattgcgattgcaagaacggttggaagggcaaaacatgccactcgcgagactcgcagtgtgacgaagccacgtgcaataatggtggcacgtgctatgacgagggagacgccttcaagtgtatgtgccctggcgggtgggagggtacaacatgtaacatcgccaggaactcgagttgtctccctaatccctgtcataacggtgggacctgtgtagtcaacggggaatcctttacatgtgtttgcaaggaaggctgggaaggcccaatctgtgcccagaatacgaacgattgctcaccgcatccgtgttataactcgggcacgtgtgtagatggcgataattggtatcgctgtgaatgcgctccaggattcgccggtccggattgtcgaataaatattaacgagtgtcagtcatcgccttgtgcctttggcgcgacatgtgttgacgaaattaacggatatcgttgcgtttgtccgcccggccattccggcgcaaaatgccaagaagttagtggaagaccttgcatcactatgggctccgttatccctgacggcgcgaagtgggacgacgattgcaacacctgccagtgtttaaatggcaggatcgcgtgttcgaaagtttggtgcgggccacgtccctgcctcctgcacaaaggacattctgagtgccctagtggtcaaagttgtataccgatattggatgatcaatgttttgtacacccgtgcacaggagttggagaatgtcgctcaagctcactccaaccagttaaaacgaagtgtacgagtgacagttattaccaggataactgtgcgaatataacattcacatttaacaaagagatgatgtctcctgggctgacgactgaacatatctgtagtgagctaaggaaccttaacatcttgaaaaacgtatctgctgaatactcaatatacatagcctgtgagccatccccttccgcgaacaatgaaatacatgtagccatttcagcagaagacatccgtgatgacggaaacccgatcaaggaaataacagacaaaataatcgacctggtctcaaaacgggatggaaattcc

SEQ ID NO: 468 - protein, 261 aa, Homo sapiens
  source 1..261: note = Jagged-1 peptide + Fc fusion
MGVKVLFALICIAVAEACDDYYYGFGCNKFCRPRDKTHTCPPCPAPEAAGGPSVFLFPPKPKDTLYITREPEVTCVVVDVSHEDPEVKFNWYVDGVEVHNAKTKPREEQYNSTYRVVSVLTVLHQDWLNGKEYKCKVSNKALPAPIEKTISKAKGQPREPQVYTLPPSRDELTKNQVSLTCLVKGFYPSDIAVEWESNGQPENNYKTTPPVLDSDGSFFLYSKLTVDKSRWQQGNVFSCSVMHEALKFHYTQKSLSLSPGK

SEQ ID NO: 469 - DNA, 783 bp, Homo sapiens
  source 1..783: mol_type = genomic DNA; note = Jagged-1 peptide + Fc fusion
atgggagtcaaagttctgtttgccctgatctgcatcgctgtggccgaggcctgtgatgactactactatggctttggctgcaataagttctgccgccccagagacaagacccacacctgccccccctgccccgcccccgaggccgccggcgggcccagcgtgttcctgttcccccccaagcccaaggacaccctgtacatcaccagggagcccgaggtgacctgcgtggtggtggacgtgagccacgaggaccccgaggtgaagttcaactggtacgtggacggcgtggaggtgcacaacgccaagaccaagcccagggaggagcagtacaacagcacctacagggtggtgagcgtgctgaccgtgctgcaccaggactggctgaacggcaaggagtacaagtgcaaggtgagcaacaaggccctgcccgcccccatcgagaagaccatcagcaaggccaagggccagcccagggagccccaggtgtacaccctgccccccagcagggacgagctgaccaagaaccaggtgagcctgacctgcctggtgaagggcttctaccccagcgacatcgccgtggagtgggagagcaacggccagcccgagaacaactacaagaccaccccccccgtgctggacagcgacggcagcttcttcctgtacagcaagctgaccgtggacaagagcaggtggcagcagggcaacgtgttcagctgcagcgtgatgcacgaggccctgaagttccactacacccagaagagcctgagcctgagccccggcaag

SEQ ID NO: 470 - protein, 276 aa, Homo sapiens
  source 1..276: note = Jagged-1 Fc + peptide fusion
MGVKVLFALICIAVAEADKTHTCPPCPAPEAAGGPSVFLFPPKPKDTLYITREPEVTCVVVDVSHEDPEVKFNWYVDGVEVHNAKTKPREEQYNSTYRVVSVLTVLHQDWLNGKEYKCKVSNKALPAPIEKTISKAKGQPREPQVYTLPPSRDELTKNQVSLTCLVKGFYPSDIAVEWESNGQPENNYKTTPPVLDSDGSFFLYSKLTVDKSRWQQGNVFSCSVMHEALKFHYTQKSLSLSPGKGGGGSGGGGSGGGGSCDDYYYGFGCNKFCRPR

SEQ ID NO: 471 - DNA, 828 bp, Homo sapiens
  source 1..828: mol_type = genomic DNA; note = Jagged-1 Fc + peptide fusion
atgggagtcaaagttctgtttgccctgatctgcatcgctgtggccgaggccgacaagacccacacctgccccccctgccccgcccccgaggccgccggcggtcccagcgtgttcctgttcccccccaagcccaaggacaccctgtacatcaccagggagcccgaggtgacctgcgtggtggtggacgtgagccacgaggaccccgaggtgaagttcaactggtacgtggacggcgtggaggtgcacaacgccaagaccaagcccagggaggagcagtacaacagcacctacagggtggtgagcgtgctgaccgtgctgcaccaggactggctgaacggcaaggagtacaagtgcaaggtgagcaacaaggccctgcccgcccccatcgagaagaccatcagcaaggccaagggccagcccagggagccccaggtgtacaccctgccccccagcagggacgagctgaccaagaaccaggtgagcctgacctgcctggtgaagggcttctaccccagcgacatcgccgtggagtgggagagcaacggccagcccgagaacaactacaagaccaccccccccgtgctggacagcgacggcagcttcttcctgtacagcaagctgaccgtggacaagagcaggtggcagcagggcaacgtgttcagctgcagcgtgatgcacgaggccctgaagttccactacacccagaagagcctgagcctgagccccggcaagggtggcggtggctcgggcggtggtgggtcgggtggcggcggatcttgtgatgactactactatggctttggctgcaataagttctgccgccccaga

SEQ ID NO: 472 - protein, 367 aa, Homo sapiens
  source 1..367: note = cystinosin wt, isoform 1
MIRNWLTIFILFPLKLVEKCESSVSLTVPPVVKLENGSSTNVSLTLRPPLNATLVITFEITFRSKNITILELPDEVVVPPGVTNSSFQVTSQNVGQLTVYLHGNHSNQTGPRIRFLVIRSSAISIINQVIGWIYFVAWSISFYPQVIMNWRRKSVIGLSFDFVALNLTGFVAYSVFNIGLLWVPYIKEQFLLKYPNGVNPVNSNDVFFSLHAVVLTLIIIVQCCLYERGGQRVSWPAIGFLVLAWLFAFVTMIVAAVGVTTWLQFLFCFSYIKLAVTLVKYFPQAYMNFYYKSTEGWSIGNVLLDFTGGSFSLLQMFLQSYNNDQWTLIFGDPTKFGLGVFSIVFDVVFFIQHFCLYRKRPGYDQLN

SEQ ID NO: 473 - DNA, 1101 bp, Homo sapiens
  source 1..1101: mol_type = genomic DNA; note = cystinosin wt, isoform 1
atgataaggaattggctgactatttttatcctttttcccctgaagctcgtagagaaatgtgagtcaagcgtcagcctcactgttcctcctgtcgtaaagctggagaacggcagctcgaccaacgtcagcctcaccctgcggccaccattaaatgcaaccctggtgatcacttttgaaatcacatttcgttccaaaaatattactatccttgagctccccgatgaagttgtggtgcctcctggagtgacaaactcctcttttcaagtgacatctcaaaatgttggacaacttactgtttatctacatggaaatcactccaatcagaccggcccgaggatacgctttcttgtgatccgcagcagcgccattagcatcataaaccaggtgattggctggatctactttgtggcctggtccatctccttctaccctcaggtgatcatgaattggaggcggaaaagtgtcattggtctgagcttcgacttcgtggctctgaacctgacgggcttcgtggcctacagtgtattcaacatcggcctcctctgggtgccctacatcaaggagcagtttctcctcaaataccccaacggagtgaaccccgtgaacagcaacgacgtcttcttcagcctgcacgcggttgtcctcacgctgatcatcatcgtgcagtgctgcctgtatgagcgcggtggccagcgcgtgtcctggcctgccatcggcttcctggtgctcgcgtggctcttcgcatttgtcaccatgatcgtggctgcagtgggagtgaccacgtggctgcagtttctcttctgcttctcctacatcaagctcgcagtcacgctggtcaagtattttccacaggcctacatgaacttttactacaaaagcactgagggctggagcattggcaacgtgctcctggacttcaccgggggcagcttcagcctcctgcagatgttcctccagtcctacaacaacgaccagtggacgctgatcttcggagacccaaccaagtttggactcggggtcttctccatcgtcttcgacgtcgtcttcttcatccagcacttctgtttgtacagaaagagaccggggtatgaccagctgaac

SEQ ID NO: 474 - protein, 400 aa, Homo sapiens
  source 1..400: note = cystinosin wt, isoform 2
MIRNWLTIFILFPLKLVEKCESSVSLTVPPVVKLENGSSTNVSLTLRPPLNATLVITFEITFRSKNITILELPDEVVVPPGVTNSSFQVTSQNVGQLTVYLHGNHSNQTGPRIRFLVIRSSAISIINQVIGWIYFVAWSISFYPQVIMNWRRKSVIGLSFDFVALNLTGFVAYSVFNIGLLWVPYIKEQFLLKYPNGVNPVNSNDVFFSLHAVVLTLIIIVQCCLYERGGQRVSWPAIGFLVLAWLFAFVTMIVAAVGVTTWLQFLFCFSYIKLAVTLVKYFPQAYMNFYYKSTEGWSIGNVLLDFTGGSFSLLQMFLQSYNNDQWTLIFGDPTKFGLGVFSIVFDVVFFIQHFCLYRKRPGLQAARTGSGSRLRQDWAPSLQPKALPQTTSVSASSLKG

SEQ ID NO: 475 - DNA, 1200 bp, Homo sapiens
  source 1..1200: mol_type = genomic DNA; note = cystinosin wt, isoform 2
atgataaggaattggctgactatttttatcctttttcccctgaagctcgtagagaaatgtgagtcaagcgtcagcctcactgttcctcctgtcgtaaagctggagaacggcagctcgaccaacgtcagcctcaccctgcggccaccattaaatgcaaccctggtgatcacttttgaaatcacatttcgttccaaaaatattactatccttgagctccccgatgaagttgtggtgcctcctggagtgacaaactcctcttttcaagtgacatctcaaaatgttggacaacttactgtttatctacatggaaatcactccaatcagaccggcccgaggatacgctttcttgtgatccgcagcagcgccattagcatcataaaccaggtgattggctggatctactttgtggcctggtccatctccttctaccctcaggtgatcatgaattggaggcggaaaagtgtcattggtctgagcttcgacttcgtggctctgaacctgacgggcttcgtggcctacagtgtattcaacatcggcctcctctgggtgccctacatcaaggagcagtttctcctcaaataccccaacggagtgaaccccgtgaacagcaacgacgtcttcttcagcctgcacgcggttgtcctcacgctgatcatcatcgtgcagtgctgcctgtatgagcgcggtggccagcgcgtgtcctggcctgccatcggcttcctggtgctcgcgtggctcttcgcatttgtcaccatgatcgtggctgcagtgggagtgaccacgtggctgcagtttctcttctgcttctcctacatcaagctcgcagtcacgctggtcaagtattttccacaggcctacatgaacttttactacaaaagcactgagggctggagcattggcaacgtgctcctggacttcaccgggggcagcttcagcctcctgcagatgttcctccagtcctacaacaacgaccagtggacgctgatcttcggagacccaaccaagtttggactcggggtcttctccatcgtcttcgacgtcgtcttcttcatccagcacttctgtttgtacagaaagagaccggggcttcaggcagcgcgcacaggctctggcagccgtctcaggcaggactgggcaccaagcttgcagccgaaggccttgccccaaactaccagcgtttctgcaagcagcttgaagggc

SEQ ID NO: 476 - protein, 475 aa, Homo sapiens
  source 1..475: note = lipoprotein lipase wt
MESKALLVLTLAVWLQSLTASRGGVAAADQRRDFIDIESKFALRTPEDTAEDTCHLIPGVAESVATCHFNHSSKTFMVIHGWTVTGMYESWVPKLVAALYKREPDSNVIVVDWLSRAQEHYPVSAGYTKLVGQDVARFINWMEEEFNYPLDNVHLLGYSLGAHAAGIAGSLTNKKVNRITGLDPAGPNFEYAEAPSRLSPDDADFVDVLHTFTRGSPGRSIGIQKPVGHVDIYPNGGTFQPGCNIGEAIRVIAERGLGDVDQLVKCSHERSIHLFIDSLLNEENPSKAYRCSSKEAFEKGLCLSCRKNRCNNLGYEINKVRAKRSSKMYLKTRSQMPYKVFHYQVKIHFSGTESETHTNQAFEISLYGTVAESENIPFTLPEVSTNKTYSFLIYTEVDIGELLMLKLKWKSDSYFSWSDWWSSPGFAIQKIRVKAGETQKKVIFCSREKVSHLQKGKAPAVFVKCHDKSLNKKSG

SEQ ID NO: 477 - DNA, 1425 bp, Homo sapiens
  source 1..1425: mol_type = genomic DNA; note = lipoprotein lipase wt
atggagagcaaagccctgctcgtgctgactctggccgtgtggctccagagtctgaccgcctcccgcggaggggtggccgccgccgaccaaagaagagattttatcgacatcgaaagtaaatttgccctaaggacccctgaagacacagctgaggacacttgccacctcattcccggagtagcagagtccgtggctacctgtcatttcaatcacagcagcaaaaccttcatggtgatccatggctggacggtaacaggaatgtatgagagttgggtgccaaaacttgtggccgccctgtacaagagagaaccagactccaatgtcattgtggtggactggctgtcacgggctcaggagcattacccagtgtccgcgggctacaccaaactggtgggacaggatgtggcccggtttatcaactggatggaggaggagtttaactaccctctggacaatgtccatctcttgggatacagccttggagcccatgctgctggcattgcaggaagtctgaccaataagaaagtcaacagaattactggcctcgatccagctggacctaactttgagtatgcagaagccccgagtcgtctttctcctgatgatgcagattttgtagacgtcttacacacattcaccagagggtcccctggtcgaagcattggaatccagaaaccagttgggcatgttgacatttacccgaatggaggtacttttcagccaggatgtaacattggagaagctatccgcgtgattgcagagagaggacttggagatgtggaccagctagtgaagtgctcccacgagcgctccattcatctcttcatcgactctctgttgaatgaagaaaatccaagtaaggcctacaggtgcagttccaaggaagcctttgagaaagggctctgcttgagttgtagaaagaaccgctgcaacaatctgggctatgagatcaataaagtcagagccaaaagaagcagcaaaatgtacctgaagactcgttctcagatgccctacaaagtcttccattaccaagtaaagattcatttttctgggactgagagtgaaacccataccaatcaggcctttgagatttctctgtatggcaccgtggccgagagtgagaacatcccattcactctgcctgaagtttccacaaataagacctactccttcctaatttacacagaggtagatattggagaactactcatgttgaagctcaaatggaagagtgattcatactttagctggtcagactggtggagcagtcccggcttcgccattcagaagatcagagtaaaagcaggagagactcagaaaaaggtgatcttctgttctagggagaaagtgtctcatttgcagaaaggaaaggcacctgcggtatttgtgaaatgccatgacaagtctctgaataagaagtcaggc

SEQ ID NO: 478 - protein, 446 aa, Homo sapiens
  source 1..446: note = lipoprotein lipase S447Stop
MESKALLVLTLAVWLQSLTASRGGVAAADQRRDFIDIESKFALRTPEDTAEDTCHLIPGVAESVATCHFNHSSKTFMVIHGWTVTGMYESWVPKLVAALYKREPDSNVIVVDWLSRAQEHYPVSAGYTKLVGQDVARFINWMEEEFNYPLDNVHLLGYSLGAHAAGIAGSLTNKKVNRITGLDPAGPNFEYAEAPSRLSPDDADFVDVLHTFTRGSPGRSIGIQKPVGHVDIYPNGGTFQPGCNIGEAIRVIAERGLGDVDQLVKCSHERSIHLFIDSLLNEENPSKAYRCSSKEAFEKGLCLSCRKNRCNNLGYEINKVRAKRSSKMYLKTRSQMPYKVFHYQVKIHFSGTESETHTNQAFEISLYGTVAESENIPFTLPEVSTNKTYSFLIYTEVDIGELLMLKLKWKSDSYFSWSDWWSSPGFAIQKIRVKAGETQKKVIFCS

SEQ ID NO: 479 - DNA, 1338 bp, Homo sapiens
  source 1..1338: mol_type = genomic DNA; note = lipoprotein lipase S447Stop
atggagagcaaggccctgctggtgctgaccctggccgtgtggctgcagagcctgaccgccagcagaggcggcgtggccgccgccgaccagagaagagacttcatcgacatcgagagcaagttcgccctgagaacccccgaggacaccgccgaggacacctgccacctgatccccggcgtggccgagagcgtggccacctgccacttcaaccacagcagcaagaccttcatggtgatccacggctggaccgtgaccggcatgtacgagagctgggtgcccaagctggtggccgccctgtacaagagagagcccgacagcaacgtgatcgtggtggactggctgagcagagcccaggagcactaccccgtgagcgccggctacaccaagctggtgggccaggacgtggccagattcatcaactggatggaggaggagttcaactaccccctggacaacgtgcacctgctgggctacagcctgggcgcccacgccgccggcatcgccggcagcctgaccaacaagaaggtgaacagaatcaccggcctggaccccgccggccccaacttcgagtacgccgaggcccccagcagactgagccccgacgacgccgacttcgtggacgtgctgcacaccttcaccagaggcagccccggcagaagcatcggcatccagaagcccgtgggccacgtggacatctaccccaacggcggcaccttccagcccggctgcaacatcggcgaggccatcagagtgatcgccgagagaggcctgggcgacgtggaccagctggtgaagtgcagccacgagagaagcatccacctgttcatcgacagcctgctgaacgaggagaaccccagcaaggcctacagatgcagcagcaaggaggccttcgagaagggcctgtgcctgagctgcagaaagaacagatgcaacaacctgggctacgagatcaacaaggtgagagccaagagaagcagcaagatgtacctgaagaccagaagccagatgccctacaaggtgttccactaccaggtgaagatccacttcagcggcaccgagagcgagacccacaccaaccaggccttcgagatcagcctgtacggcaccgtggccgagagcgagaacatccccttcaccctgcccgaggtgagcaccaacaagacctacagcttcctgatctacaccgaggtggacatcggcgagctgctgatgctgaagctgaagtggaagagcgacagctacttcagctggagcgactggtggagcagccccggcttcgccatccagaagatcagagtgaaggccggcgagacccagaagaaggtgatcttctgcagc

SEQ ID NO: 480 - protein, 147 aa, Homo sapiens
  source 1..147: note = transthyretin T119M
MASHRLLLLCLAGLVFVSEAGPTGTGESKCPLMVKVLDAVRGSPAINVAVHVFRKAADDTWEPFASGKTSESGELHGLTTEEEFVEGIYKVEIDTKSYWKALGISPFHEHAEVVFTANDSGPRRYTIAALLSPYSYSTMAVVTNPKE

SEQ ID NO: 481 - DNA, 441 bp, Homo sapiens
  source 1..441: mol_type = genomic DNA; note = transthyretin T119M
atggccagccacagactgctgctgctgtgcctggccggcctggtgttcgtgagcgaggccggccccaccggcaccggcgagagcaagtgccccctgatggtgaaggtgctggacgccgtgagaggcagccccgccatcaacgtggccgtgcacgtgttcagaaaggccgccgacgacacctgggagcccttcgccagcggcaagaccagcgagagcggcgagctgcacggcctgaccaccgaggaggagttcgtggagggcatctacaaggtggagatcgacaccaagagctactggaaggccctgggcatcagccccttccacgagcacgccgaggtggtgttcaccgccaacgacagcggccccagaagatacaccatcgccgccctgctgagcccctacagctacagcaccatggccgtggtgaccaaccccaaggag

SEQ ID NO: 482 - protein, 218 aa, Homo sapiens
  source 1..218: note = hypoxanthine phosphoribosyltransferase 1 wt
MATRSPGVVISDDEPGYDLDLFCIPNHYAEDLERVFIPHGLIMDRTERLARDVMKEMGGHHIVALCVLKGGYKFFADLLDYIKALNRNSDRSIPMTVDFIRLKSYCNDQSTGDIKVIGGDDLSTLTGKNVLIVEDIIDTGKTMQTLLSLVRQYNPKMVKVASLLVKRTPRSVGYKPDFVGFEIPDKFVVGYALDYNEYFRDLNHVCVISETGKAKYKA

SEQ ID NO: 483 - DNA, 654 bp, Homo sapiens
  source 1..654: mol_type = genomic DNA; note = hypoxanthine phosphoribosyltransferase 1 wt
atggcgacccgcagccctggcgtcgtgattagtgatgatgaaccaggttatgaccttgatttattttgcatacctaatcattatgctgaggatttggaaagggtgtttattcctcatggactaattatggacaggactgaacgtcttgctcgagatgtgatgaaggagatgggaggccatcacattgtagccctctgtgtgctcaaggggggctataaattctttgctgacctgctggattacatcaaagcactgaatagaaatagtgatagatccattcctatgactgtagattttatcagactgaagagctattgtaatgaccagtcaacaggggacataaaagtaattggtggagatgatctctcaactttaactggaaagaatgtcttgattgtggaagatataattgacactggcaaaacaatgcagactttgctttccttggtcaggcagtataatccaaagatggtcaaggtcgcaagcttgctggtgaaaaggaccccacgaagtgttggatataagccagactttgttggatttgaaattccagacaagtttgttgtaggatatgcccttgactataatgaatacttcagggatttgaatcatgtttgtgtcattagtgaaactggaaaagcaaaatacaaagcc

SEQ ID NO: 484 - protein, 418 aa, Homo sapiens
  source 1..418: note = alpha1-antitrypsin wt
MPSSVSWGILLLAGLCCLVPVSLAEDPQGDAAQKTDTSHHDQDHPTFNKITPNLAEFAFSLYRQLAHQSNSTNIFFSPVSIATAFAMLSLGTKADTHDEILEGLNFNLTEIPEAQIHEGFQELLRTLNQPDSQLQLTTGNGLFLSEGLKLVDKFLEDVKKLYHSEAFTVNFGDTEEAKKQINDYVEKGTQGKIVDLVKELDRDTVFALVNYIFFKGKWERPFEVKDTEEEDFHVDQVTTVKVPMMKRLGMFNIQHCKKLSSWVLLMKYLGNATAIFFLPDEGKLQHLENELTHDIITKFLENEDRRSASLHLPKLSITGTYDLKSVLGQLGITKVFSNGADLSGVTEEAPLKLSKAVHKAVLTIDEKGTEAAGAMFLEAIPMSIPPEVKFNKPFVFLMIEQNTKSPLFMGKVVNPTQK

SEQ ID NO: 485 - DNA, 1254 bp, Homo sapiens
  source 1..1254: mol_type = genomic DNA; note = alpha1-antitrypsin wt
atgccgtcttctgtctcgtggggcatcctcctgctggcaggcctgtgctgcctggtccctgtctccctggctgaggatccccagggagatgctgcccagaagacagatacatcccaccatgatcaggatcacccaaccttcaacaagatcacccccaacctggctgagttcgccttcagcctataccgccagctggcacaccagtccaacagcaccaatatcttcttctccccagtgagcatcgctacagcctttgcaatgctctccctggggaccaaggctgacactcacgatgaaatcctggagggcctgaatttcaacctcacggagattccggaggctcagatccatgaaggcttccaggaactcctccgtaccctcaaccagccagacagccagctccagctgaccaccggcaatggcctgttcctcagcgagggcctgaagctagtggataagtttttggaggatgttaaaaagttgtaccactcagaagccttcactgtcaacttcggggacaccgaagaggccaagaaacagatcaacgattacgtggagaagggtactcaagggaaaattgtggatttggtcaaggagcttgacagagacacagtttttgctctggtgaattacatcttctttaaaggcaaatgggagagaccctttgaagtcaaggacaccgaggaagaggacttccacgtggaccaggtgaccaccgtgaaggtgcctatgatgaagcgtttaggcatgtttaacatccagcactgtaagaagctgtccagctgggtgctgctgatgaaatacctgggcaatgccaccgccatcttcttcctgcctgatgaggggaaactacagcacctggaaaatgaactcacccacgatatcatcaccaagttcctggaaaatgaagacagaaggtctgccagcttacatttacccaaactgtccattactggaacctatgatctgaagagcgtcctgggtcaactgggcatcactaaggtcttcagcaatggggctgacctctccggggtcacagaggaggcacccctgaagctctccaaggccgtgcataaggctgtgctgaccatcgacgagaaagggactgaagctgctggggccatgtttttagaggccatacccatgtctatcccccccgaggtcaagttcaacaaaccctttgtcttcttaatgattgaacaaaataccaagtctcccctcttcatgggaaaagtggtgaatcccacccaaaaa

SEQ ID NO: 486 - protein, 1500 aa, Homo sapiens
  source 1..1500: note = carbamoyl phosphate synthase 1 wt
MTRILTAFKVVRTLKTGFGFTNVTAHQKWKFSRPGIRLLSVKAQTAHIVLEDGTKMKGYSFGHPSSVAGEVVFNTGLGGYPEAITDPAYKGQILTMANPIIGNGGAPDTTALDELGLSKYLESNGIKVSGLLVLDYSKDYNHWLATKSLGQWLQEEKVPAIYGVDTRMLTKIIRDKGTMLGKIEFEGQPVDFVDPNKQNLIAEVSTKDVKVYGKGNPTKVVAVDCGIKNNVIRLLVKRGAEVHLVPWNHDFTKMEYDGILIAGGPGNPALAEPLIQNVRKILESDRKEPLFGISTGNLITGLAAGAKTYKMSMANRGQNQPVLNITNKQAFITAQNHGYALDNTLPAGWKPLFVNVNDQTNEGIMHESKPFFAVQFHPEVTPGPIDTEYLFDSFFSLIKKGKATTITSVLPKPALVASRVEVSKVLILGSGGLSIGQAGEFDYSGSQAVKAMKEENVKTVLMNPNIASVQTNEVGLKQADTVYFLPITPQFVTEVIKAEQPDGLILGMGGQTALNCGVELFKRGVLKEYGVKVLGTSVESIMATEDRQLFSDKLNEINEKIAPSFAVESIEDALKAADTIGYPVMIRSAYALGGLGSGICPNRETLMDLSTKAFAMTNQILVEKSVTGWKEIEYEVVRDADDNCVTVCNMENVDAMGVHTGDSVVVAPAQTLSNAEFQMLRRTSINVVRHLGIVGECNIQFALHPTSMEYCIIEVNARLSRSSALASKATGYPLAFIAAKIALGIPLPEIKNVVSGKTSACFEPSLDYMVTKIPRWDLDRFHGTSSRIGSSMKSVGEVMAIGRTFEESFQKALRMCHPSIEGFTPRLPMNKEWPSNLDLRKELSEPSSTRIYAIAKAIDDNMSLDEIEKLTYIDKWFLYKMRDILNMEKTLKGLNSESMTEETLKRAKEIGFSDKQISKCLGLTEAQTRELRLKKNIHPWVKQIDTLAAEYPSVTNYLYVTYNGQEHDVNFDDHGMMVLGCGPYHIGSSVEFDWCAVSSIRTLRQLGKKTVVVNCNPETVSTDFDECDKLYFEELSLERILDIYHQEACGGCIISVGGQIPNNLAVPLYKNGVKIMGTSPLQIDRAEDRSIFSAVLDELKVAQAPWKAVNTLNEALEFAKSVDYPCLLRPSYVLSGSAMNVVFSEDEMKKFLEEATRVSQEHPVVLTKFVEGAREVEMDAVGKDGRVISHAISEHVEDAGVHSGDATLMLPTQTISQGAIEKVKDATRKIAKAFAISGPFNVQFLVKGNDVLVIECNLRASRSFPFVSKTLGVDFIDVATKVMIGENVDEKHLPTLDHPIIPADYVAIKAPMFSWPRLRDADPILRCEMASTGEVACFGEGIHTAFLKAMLSTGFKIPQKGILIGIQQSFRPRFLGVAEQLHNEGFKLFATEATSDWLNANNVPATPVAWPSQEGQNPSLSSIRKLIRDGSIDLVINLPNNNTKFVHDNYVIRRTAVDSGIPLLTNFQVTKLFAEAVQKSRKVDSKSLFHYRQYSAGKAA

SEQ ID NO: 487 - DNA, 4500 bp, Homo sapiens
  source 1..4500: mol_type = genomic DNA; note = carbamoyl phosphate synthase 1 wt
atgacgaggattttgacagctttcaaagtggtgaggacactgaagactggttttggctttaccaatgtgactgcacaccaaaaatggaaattttcaagacctggcatcaggctcctttctgtcaaggcacagacagcacacattgtcctggaagatggaactaagatgaaaggttactcctttggccatccatcctctgttgctggtgaagtggtttttaatactggcctgggagggtacccagaagctattactgaccctgcctacaaaggacagattctcacaatggccaaccctattattgggaatggtggagctcctgatactactgctctggatgaactgggacttagcaaatatttggagtctaatggaatcaaggtttcaggtttgctggtgctggattatagtaaagactacaaccactggctggctaccaagagtttagggcaatggctacaggaagaaaaggttcctgcaatttatggagtggacacaagaatgctgactaaaataattcgggataagggtaccatgcttgggaagattgaatttgaaggtcagcctgtggattttgtggatccaaataaacagaatttgattgctgaggtttcaaccaaggatgtcaaagtgtacggcaaaggaaaccccacaaaagtggtagctgtagactgtgggattaaaaacaatgtaatccgcctgctagtaaagcgaggagctgaagtgcacttagttccctggaaccatgatttcaccaagatggagtatgatgggattttgatcgcgggaggaccggggaacccagctcttgcagaaccactaattcagaatgtcagaaagattttggagagtgatcgcaaggagccattgtttggaatcagtacaggaaacttaataacaggattggctgctggtgccaaaacctacaagatgtccatggccaacagagggcagaatcagcctgttttgaatatcacaaacaaacaggctttcattactgctcagaatcatggctatgccttggacaacaccctccctgctggctggaaaccactttttgtgaatgtcaacgatcaaacaaatgaggggattatgcatgagagcaaacccttcttcgctgtgcagttccacccagaggtcaccccggggccaatagacactgagtacctgtttgattcctttttctcactgataaagaaaggaaaagctaccaccattacatcagtcttaccgaagccagcactagttgcatctcgggttgaggtttccaaagtccttattctaggatcaggaggtctgtccattggtcaggctggagaatttgattactcaggatctcaagctgtaaaagccatgaaggaagaaaatgtcaaaactgttctgatgaacccaaacattgcatcagtccagaccaatgaggtgggcttaaagcaagcggatactgtctactttcttcccatcacccctcagtttgtcacagaggtcatcaaggcagaacagccagatgggttaattctgggcatgggtggccagacagctctgaactgtggagtggaactattcaagagaggtgtgctcaaggaatatggtgtgaaagtcctgggaacttcagttgagtccattatggctacggaagacaggcagctgttttcagataaactaaatgagatcaatgaaaagattgctccaagttttgcagtggaatcgattgaggatgcactgaaggcagcagacaccattggctacccagtgatgatccgttccgcctatgcactgggtgggttaggctcaggcatctgtcccaacagagagactttgatggacctcagcacaaaggcctttgctatgaccaaccaaattctggtggagaagtcagtgacaggttggaaagaaatagaatatgaagtggttcgagatgctgatgacaattgtgtcactgtctgtaacatggaaaatgttgatgccatgggtgttcacacaggtgactcagttgttgtggctcctgcccagacactctccaatgccgagtttcagatgttgagacgtacttcaatcaatgttgttcgccacttgggcattgtgggtgaatgcaacattcagtttgcccttcatcctacctcaatggaatactgcatcattgaagtgaatgccagactgtcccgaagctctgctctggcctcaaaagccactggctacccattggcattcattgctgcaaagattgccctaggaatcccacttccagaaattaagaacgtcgtatccgggaagacatcagcctgttttgaacctagcctggattacatggtcaccaagattccccgctgggatcttgaccgttttcatggaacatctagccgaattggtagctctatgaaaagtgtaggagaggtcatggctattggtcgtacctttgaggagagtttccagaaagctttacggatgtgccacccatctatagaaggtttcactccccgtctcccaatgaacaaagaatggccatctaatttagatcttagaaaagagttgtctgaaccaagcagcacgcgtatctatgccattgccaaggccattgatgacaacatgtcccttgatgagattgagaagctcacatacattgacaagtggtttttgtataagatgcgtgatattttaaacatggaaaagacactgaaaggcctcaacagtgagtccatgacagaagaaaccctgaaaagggcaaaggagattgggttctcagataagcagatttcaaaatgccttgggctcactgaggcccagacaagggagctgaggttaaagaaaaacatccacccttgggttaaacagattgatacactggctgcagaatacccatcagtaacaaactatctctatgttacctacaatggtcaggagcatgatgtcaattttgatgaccatggaatgatggtgctaggctgtggtccatatcacattggcagcagtgtggaatttgattggtgtgctgtctctagtatccgcacactgcgtcaacttggcaagaagacggtggtggtgaattgcaatcctgagactgtgagcacagactttgatgagtgtgacaaactgtactttgaagagttgtccttggagagaatcctagacatctaccatcaggaggcatgtggtggctgcatcatatcagttggaggccagattccaaacaacctggcagttcctctatacaagaatggtgtcaagatcatgggcacaagccccctgcagatcgacagggctgaggatcgctccatcttctcagctgtcttggatgagctgaaggtggctcaggcaccttggaaagctgttaatactttgaatgaagcactggaatttgcaaagtctgtggactacccctgcttgttgaggccttcctatgttttgagtgggtctgctatgaatgtggtattctctgaggatgagatgaaaaaattcctagaagaggcgactagagtttctcaggagcacccagtggtgctgacaaaatttgttgaaggggcccgagaagtagaaatggacgctgttggcaaagatggaagggttatctctcatgccatctctgaacatgttgaagatgcaggtgtccactcgggagatgccactctgatgctgcccacacaaaccatcagccaaggggccattgaaaaggtgaaggatgctacccggaagattgcaaaggcttttgccatctctggtccattcaacgtccaatttcttgtcaaaggaaatgatgtcttggtgattgagtgtaacttgagagcttctcgatccttcccctttgtttccaagactcttggggttgacttcattgatgtggccaccaaggtgatgattggagagaatgttgatgagaaacatcttccaacattggaccatcccataattcctgctgactatgttgcaattaaggctcccatgttttcctggccccggttgagggatgctgaccccattctgagatgtgagatggcttccactggagaggtggcttgctttggtgaaggtattcatacagccttcctaaaggcaatgctttccacaggatttaagataccccagaaaggcatcctgataggcatccagcaatcattccggccaagattccttggtgtggctgaacaattacacaatgaaggtttcaagctgtttgccacggaagccacatcagactggctcaacgccaacaatgtccctgccaccccagtggcatggccgtctcaagaaggacagaatcccagcctctcttccatcagaaaattgattagagatggcagcattgacctagtgattaaccttcccaacaacaacactaaatttgtccatgataattatgtgattcggaggacagctgttgatagtggaatccctctcctcactaattttcaggtgaccaaactttttgctgaagctgtgcagaaatctcgcaaggtggactccaagagtcttttccactacaggcagtacagtgctggaaaagcagca

SEQ ID NO: 488 - protein, 421 aa, Homo sapiens
  source 1..421: note = medium-chain specific acyl-CoA dehydrogenase wt, isoform 1
MAAGFGRCCRVLRSISRFHWRSQHTKANRQREPGLGFSFEFTEQQKEFQATARKFAREEIIPVAAEYDKTGEYPVPLIRRAWELGLMNTHIPENCGGLGLGTFDACLISEELAYGCTGVQTAIEGNSLGQMPIIIAGNDQQKKKYLGRMTEEPLMCAYCVTEPGAGSDVAGIKTKAEKKGDEYIINGQKMWITNGGKANWYFLLARSDPDPKAPANKAFTGFIVEADTPGIQIGRKELNMGQRCSDTRGIVFEDVKVPKENVLIGDGAGFKVAMGAFDKTRPVVAAGAVGLAQRALDEATKYALERKTFGKLLVEHQAISFMLAEMAMKVELARMSYQRAAWEVDSGRRNTYYASIAKAFAGDIANQLATDAVQILGGNGFNTEYPVEKLMRDAKIYQIYEGTSQIQRLIVAREHIDKYKN

SEQ ID NO: 489 - DNA, 1263 bp, Homo sapiens
  source 1..1263: mol_type = genomic DNA; note = medium-chain specific acyl-CoA dehydrogenase wt, isoform 1
atggcagcggggttcgggcgatgctgcagggtcctgagaagtatttctcgttttcattggagatcacagcatacaaaagccaatcgacaacgtgaaccaggattaggatttagttttgagttcaccgaacagcagaaagaatttcaagctactgctcgtaaatttgccagagaggaaatcatcccagtggctgcagaatatgataaaactggtgaatatccagtccccctaattagaagagcctgggaacttggtttaatgaacacacacattccagagaactgtggaggtcttggacttggaacttttgatgcttgtttaattagtgaagaattggcttatggatgtacaggggttcagactgctattgaaggaaattctttggggcaaatgcctattattattgctggaaatgatcaacaaaagaagaagtatttggggagaatgactgaggagccattgatgtgtgcttattgtgtaacagaacctggagcaggctctgatgtagctggtataaagaccaaagcagaaaagaaaggagatgagtatattattaatggtcagaagatgtggataaccaacggaggaaaagctaattggtattttttattggcacgttctgatccagatcctaaagctcctgctaataaagcctttactggattcattgtggaagcagataccccaggaattcagattgggagaaaggaattaaacatgggccagcgatgttcagatactagaggaattgtcttcgaagatgtgaaagtgcctaaagaaaatgttttaattggtgacggagctggtttcaaagttgcaatgggagcttttgataaaaccagacctgtagtagctgctggtgctgttggattagcacaaagagctttggatgaagctaccaagtatgccctggaaaggaaaactttcggaaagctacttgtagagcaccaagcaatatcatttatgctggctgaaatggcaatgaaagttgaactagctagaatgagttaccagagagcagcttgggaggttgattctggtcgtcgaaatacctattatgcttctattgcaaaggcatttgctggagatattgcaaatcagttagctactgatgctgtgcagatacttggaggcaatggatttaatacagaatatcctgtagaaaaactaatgagggatgccaaaatctatcagatttatgaaggtacttcacaaattcaaagacttattgtagcccgtgaacacattgacaagtacaaaaat

SEQ ID NO: 490 - protein, 425 aa, Homo sapiens
  source 1..425: note = medium-chain specific acyl-CoA dehydrogenase wt, isoform 2
MAAGFGRCCRCSLQVLRSISRFHWRSQHTKANRQREPGLGFSFEFTEQQKEFQATARKFAREEIIPVAAEYDKTGEYPVPLIRRAWELGLMNTHIPENCGGLGLGTFDACLISEELAYGCTGVQTAIEGNSLGQMPIIIAGNDQQKKKYLGRMTEEPLMCAYCVTEPGAGSDVAGIKTKAEKKGDEYIINGQKMWITNGGKANWYFLLARSDPDPKAPANKAFTGFIVEADTPGIQIGRKELNMGQRCSDTRGIVFEDVKVPKENVLIGDGAGFKVAMGAFDKTRPVVAAGAVGLAQRALDEATKYALERKTFGKLLVEHQAISFMLAEMAMKVELARMSYQRAAWEVDSGRRNTYYASIAKAFAGDIANQLATDAVQILGGNGFNTEYPVEKLMRDAKIYQIYEGTSQIQRLIVAREHIDKYKN

SEQ ID NO: 491 - DNA, 1275 bp, Homo sapiens
  source 1..1275: mol_type = genomic DNA; note = medium-chain specific acyl-CoA dehydrogenase wt, isoform 2
atggcagcggggttcgggcgatgctgcaggtgttctttacaggtcctgagaagtatttctcgttttcattggagatcacagcatacaaaagccaatcgacaacgtgaaccaggattaggatttagttttgagttcaccgaacagcagaaagaatttcaagctactgctcgtaaatttgccagagaggaaatcatcccagtggctgcagaatatgataaaactggtgaatatccagtccccctaattagaagagcctgggaacttggtttaatgaacacacacattccagagaactgtggaggtcttggacttggaacttttgatgcttgtttaattagtgaagaattggcttatggatgtacaggggttcagactgctattgaaggaaattctttggggcaaatgcctattattattgctggaaatgatcaacaaaagaagaagtatttggggagaatgactgaggagccattgatgtgtgcttattgtgtaacagaacctggagcaggctctgatgtagctggtataaagaccaaagcagaaaagaaaggagatgagtatattattaatggtcagaagatgtggataaccaacggaggaaaagctaattggtattttttattggcacgttctgatccagatcctaaagctcctgctaataaagcctttactggattcattgtggaagcagataccccaggaattcagattgggagaaaggaattaaacatgggccagcgatgttcagatactagaggaattgtcttcgaagatgtgaaagtgcctaaagaaaatgttttaattggtgacggagctggtttcaaagttgcaatgggagcttttgataaaaccagacctgtagtagctgctggtgctgttggattagcacaaagagctttggatgaagctaccaagtatgccctggaaaggaaaactttcggaaagctacttgtagagcaccaagcaatatcatttatgctggctgaaatggcaatgaaagttgaactagctagaatgagttaccagagagcagcttgggaggttgattctggtcgtcgaaatacctattatgcttctattgcaaaggcatttgctggagatattgcaaatcagttagctactgatgctgtgcagatacttggaggcaatggatttaatacagaatatcctgtagaaaaactaatgagggatgccaaaatctatcagatttatgaaggtacttcacaaattcaaagacttattgtagcccgtgaacacattgacaagtacaaaaat

SEQ ID NO: 492 - protein, 655 aa, Homo sapiens
  source 1..655: note = very long-chain specific acyl-CoA dehydrogenase wt, isoform 1
MQAARMAASLGRQLLRLGGGSSRLTALLGQPRPGPARRPYAGGAAQLALDKSDSHPSDALTRKKPAKAESKSFAVGMFKGQLTTDQVFPYPSVLNEEQTQFLKELVEPVSRFFEEVNDPAKNDALEMVEETTWQGLKELGAFGLQVPSELGGVGLCNTQYARLVEIVGMHDLGVGITLGAHQSIGFKGILLFGTKAQKEKYLPKLASGETVAAFCLTEPSSGSDAASIRTSAVPSPCGKYYTLNGSKLWISNGGLADIFTVFAKTPVTDPATGAVKEKITAFVVERGFGGITHGPPEKKMGIKASNTAEVFFDGVRVPSENVLGEVGSGFKVAMHILNNGRFGMAAALAGTMRGIIAKAVDHATNRTQFGEKIHNFGLIQEKLARMVMLQYVTESMAYMVSANMDQGATDFQIEAAISKIFGSEAAWKVTDECIQIMGGMGFMKEPGVERVLRDLRIFRIFEGTNDILRLFVALQGCMDKGKELSGLGSALKNPFGNAGLLLGEAGKQLRRRAGLGSGLSLSGLVHPELSRSGELAVRALEQFATVVEAKLIKHKKGIVNEQFLLQRLADGAIDLYAMVVVLSRASRSLSEGHPTAQHEKMLCDTWCIEAAARIREGMAALQSDPWQQELYRNFKSISKALVERGGVVTSNPLGF

SEQ ID NO: 493 - DNA, 1965 bp, Homo sapiens
  source 1..1965: mol_type = genomic DNA; note = very long-chain specific acyl-CoA dehydrogenase wt, isoform 1
atgcaggcggcacggatggcagcgagcttggggcggcagctgctgaggctcgggggaggaagcagtcggctgactgcgctcttagggcaaccccggcccggccctgcccggcggccctatgccgggggtgccgctcagctggctctggacaagtcagattcccacccctctgacgctctgaccaggaaaaaaccggccaaggcggaatctaagtcctttgctgtgggaatgttcaaaggccagttaaccacagatcaggtgttcccatacccgtccgtgctcaacgaagagcagacacagttccttaaagagctggtggagcctgtgtcgcgtttcttcgaagaagtgaacgatcccgccaagaatgacgctttagagatggttgaggagaccacttggcagggcctcaaggaactgggggcctttggtctgcaagtgcccagtgagctgggtggtgtaggcctttgcaacacccagtacgcccgtttggtggagatcgtgggcatgcatgaccttggcgtgggcattaccctgggggcccatcagagcatcggttttaaaggcatcctgctctttggcacaaaggcccagaaagaaaaatacctccccaagctggcatctggggagactgtggccgctttctgtctaaccgagccctcaagcgggtcagatgcagcctccatccgaacctctgctgtgcccagcccctgtggaaaatactataccctcaatggaagcaagctttggatcagtaatgggggcctagcagacatcttcacggtctttgccaagacaccagttacagatccagccacaggagccgtgaaagagaagatcacagcttttgtggtggaaaggggcttcgggggcattacccatgggccccctgagaagaagatgggcatcaaggcttcaaacacagcagaggtgttctttgatggagtccgggtgccaagtgagaacgtgctgggtgaagttgggagtggcttcaaggttgccatgcacatcctcaacaatggaaggtttggcatggctgcggccctggcaggtaccatgagaggcatcattgctaaggcggtagatcatgccactaatcgtacccagtttggggagaaaattcacaactttgggctgatccaggagaagctggcacggatggttatgctgcagtatgtaactgagtccatggcttacatggtgagtgctaacatggaccagggagccacggacttccagatagaggccgccatcagcaaaatctttggctcggaggcagcctggaaggtgacagatgaatgcatccaaatcatggggggtatgggcttcatgaaggaacctggagtagagcgtgtgctccgagatcttcgcatcttccggatctttgagggaacaaatgacattcttcggctgtttgtggctctgcagggctgtatggacaaaggaaaggagctctctgggcttggcagtgctctaaagaatcccttcgggaatgctggcctcctgctaggagaggcaggcaaacagcttaggcggcgggcagggctgggcagcggcctgagtttgagcggacttgtccacccggagttgagtcggtctggcgagctggcagtacgggctctggagcagtttgccactgtggtggaggccaagctgataaaacacaagaaggggattgtcaatgaacagtttctgctgcagcggctggcagacggggccatcgacctctatgccatggtggtggttttgtcgagggcctcaagatccctgagtgagggccaccccacggcccagcatgagaaaatgctctgtgacacctggtgtatcgaagctgcagctcggatccgagagggcatggccgccctgcagtctgacccctggcagcaagagctctatcgcaacttcaaatctatctccaaggccttggtggagcggggtggtgtggtcaccagtaacccacttggcttc

SEQ ID NO: 494 - protein, 633 aa, Homo sapiens
  source 1..633: note = very long-chain specific acyl-CoA dehydrogenase wt, isoform 2
MQAARMAASLGRQLLRLGGGSSRLTALLGQPRPGPARRPYAGGAAQESKSFAVGMFKGQLTTDQVFPYPSVLNEEQTQFLKELVEPVSRFFEEVNDPAKNDALEMVEETTWQGLKELGAFGLQVPSELGGVGLCNTQYARLVEIVGMHDLGVGITLGAHQSIGFKGILLFGTKAQKEKYLPKLASGETVAAFCLTEPSSGSDAASIRTSAVPSPCGKYYTLNGSKLWISNGGLADIFTVFAKTPVTDPATGAVKEKITAFVVERGFGGITHGPPEKKMGIKASNTAEVFFDGVRVPSENVLGEVGSGFKVAMHILNNGRFGMAAALAGTMRGIIAKAVDHATNRTQFGEKIHNFGLIQEKLARMVMLQYVTESMAYMVSANMDQGATDFQIEAAISKIFGSEAAWKVTDECIQIMGGMGFMKEPGVERVLRDLRIFRIFEGTNDILRLFVALQGCMDKGKELSGLGSALKNPFGNAGLLLGEAGKQLRRRAGLGSGLSLSGLVHPELSRSGELAVRALEQFATVVEAKLIKHKKGIVNEQFLLQRLADGAIDLYAMVVVLSRASRSLSEGHPTAQHEKMLCDTWCIEAAARIREGMAALQSDPWQQELYRNFKSISKALVERGGVVTSNPLGF

SEQ ID NO: 495 - DNA, 1899 bp, Homo sapiens
  source 1..1899: mol_type = genomic DNA; note = very long-chain specific acyl-CoA dehydrogenase wt, isoform 2
atgcaggcggctcggatggccgcgagcttggggcggcagcttttaaggttagggggcggaagctcgcggttgacggcgctcctggggcagccccggcccggccctgcccgtcggccctatgccgggggtgccgcacaggaatctaagtcctttgcagtcggaatgttcaaaggccagctcaccacagatcaggtgttcccgtacccgtccgtgctcaacgaagagcagacacagtttcttaaagagctggtggagcctgtgtcccgtttcttcgaggaagtgaacgatcccgccaagaatgacgctctggagatggtggaggagaccacttggcagggcctcaaggagctgggggcctttggtctgcaggtgcccagtgagctgggtggtgtgggcctttgcaacacccagtacgcccgtttggtggagatcgtgggcatgcatgaccttggcgtgggcattaccctgggggcccatcagagcatcggtttcaaaggcatcctgctctttggcacaaaggcgcagaaagaaaaatacctccccaaactggcatctggggagactgtggccgctttctgtctaaccgagccctcaagcgggtcagatgcagcctccatccgaacctctgctgtgcccagcccctgcggaaaatactataccctcaatggaagcaagctttggatcagtaatgggggcctagccgacatcttcacggtctttgccaagacaccagttacagatccagccacaggagccgtgaaggagaagatcacagcttttgtggtagagaggggcttcgggggcattacccatgggccccctgagaagaagatgggcattaaggcttcaaacacagccgaggtgttctttgatggagtacgggtgccatcggagaacgtgctgggtgaggttgggagtggcttcaaggttgccatgcacatcctcaacaatggaaggtttggcatggctgcggccctggcaggtaccatgagaggcatcattgctaaggcggtagatcatgccactaatcgtacccagtttggggagaaaattcacaactttgggctgatccaggagaagctggcacggatggttatgctgcagtatgtaactgagtccatggcttacatggtgagtgctaacatggaccagggagccacggacttccagatagaggccgccatcagcaaaatctttggctcggaggcagcctggaaggtgacagatgaatgcatccaaatcatggggggtatgggcttcatgaaggaacctggagtagagcgtgtgctccgagatcttcgcatcttccggatctttgaggggacaaatgacattcttcgcctgtttgtggctctgcaaggctgtatggacaaaggaaaggagctctctgggcttggcagtgcactaaagaatccctttgggaatgctggcctcctgctaggagaggcaggcaaacagctgaggcggcgggcagggctgggcagcggcctgagtctcagcggacttgtccacccggagttgagtcggagtggcgagctggcagtacgggctctggagcagtttgccactgtggtggaggctaagctgataaaacacaagaaggggattgtcaatgaacagtttctgctgcagcggctggcagacggggccatcgacctctatgccatggtggtggttctctcgagggcctcaagatccctgagtgagggccaccccacggcccagcatgagaaaatgctctgtgacacctggtgtatcgaggctgcagctcggatccgagagggcatggccgccctgcagtctgacccctggcagcaagagctctaccgcaacttcaaaagcatctccaaggccttggtggaacggggtggtgtggtcaccagcaacccacttggcttc

SEQ ID NO: 496 - protein, 678 aa, Homo sapiens
  source 1..678: note = very long-chain specific acyl-CoA dehydrogenase wt, isoform 3
MLGGLAAAAGTRIMGKEIEAEAQRPLRQTWRPGQPPAMTAKTMSSRLTALLGQPRPGPARRPYAGGAAQLALDKSDSHPSDALTRKKPAKAESKSFAVGMFKGQLTTDQVFPYPSVLNEEQTQFLKELVEPVSRFFEEVNDPAKNDALEMVEETTWQGLKELGAFGLQVPSELGGVGLCNTQYARLVEIVGMHDLGVGITLGAHQSIGFKGILLFGTKAQKEKYLPKLASGETVAAFCLTEPSSGSDAASIRTSAVPSPCGKYYTLNGSKLWISNGGLADIFTVFAKTPVTDPATGAVKEKITAFVVERGFGGITHGPPEKKMGIKASNTAEVFFDGVRVPSENVLGEVGSGFKVAMHILNNGRFGMAAALAGTMRGIIAKAVDHATNRTQFGEKIHNFGLIQEKLARMVMLQYVTESMAYMVSANMDQGATDFQIEAAISKIFGSEAAWKVTDECIQIMGGMGFMKEPGVERVLRDLRIFRIFEGTNDILRLFVALQGCMDKGKELSGLGSALKNPFGNAGLLLGEAGKQLRRRAGLGSGLSLSGLVHPELSRSGELAVRALEQFATVVEAKLIKHKKGIVNEQFLLQRLADGAIDLYAMVVVLSRASRSLSEGHPTAQHEKMLCDTWCIEAAARIREGMAALQSDPWQQELYRNFKSISKALVERGGVVTSNPLGF

SEQ ID NO: 497 - DNA, 2034 bp, Homo sapiens
  source 1..2034: mol_type = genomic DNA; note = very long-chain specific acyl-CoA dehydrogenase wt, isoform 3
atgttggggggcctggccgcggcggcgggaacccggataatgggaaaggagatagaagcagaagcacagaggcccctgaggcaaacatggagacctggccagccaccagcgatgacagcaaagacgatgagctcgcggctcacggcgctcctggggcagccccggcccggccctgcccggcggccctatgccgggggtgccgctcaactggctctggacaagtcagattcccacccctctgacgctctgaccaggaaaaagccggccaaggcggaatctaagtcctttgctgtgggaatgttcaaaggccagctcaccacagatcaggtgttcccatacccgtccgtgctcaacgaagagcagacacagtttcttaaagagctggtggagcctgtgtcccgtttcttcgaggaagtgaacgatcccgccaagaatgacgctctggagatggtggaggagaccacttggcagggcctcaaggagctgggggcctttggtctgcaagtgcccagtgagctgggtggtgtgggcctttgcaacacccagtacgcccgtttggtggagatcgtgggcatgcatgaccttggcgtgggcatcaccctgggggcccatcagagcatcggtttcaaaggcatcctgctttttggcacaaaggcccagaaagaaaaatacctccccaagctggcatctggggagactgtggccgctttctgtctaaccgagccctcaagcgggtcagatgcagcctccatccgaacctctgctgtgcccagcccctgtggaaaatactataccctcaatggaagcaagctttggatcagtaatgggggcctagcagacattttcacggtctttgccaagacaccagttacagatccagccacaggagccgtgaaggagaagatcacagcttttgtggtggagaggggcttcgggggcattacccatgggccccctgagaagaagatgggcatcaaggcttcaaacacagcagaggtgttctttgatggagtacgggtgccatcggagaacgtgctgggtgaggttgggagtggcttcaaggttgccatgcacatcctcaacaatggaaggtttggcatggctgcggccctggcaggtaccatgagaggcatcattgctaaggcggtagatcatgccactaatcgtacccagtttggggaaaaaattcacaactttgggctgatccaggagaagctggcacggatggttatgctgcagtatgtaactgagtccatggcttacatggtgagtgctaacatggaccagggagccacggacttccagatagaggccgccatcagcaaaatctttggctcggaggcagcctggaaggtgacagatgaatgcatccaaatcatggggggtatgggcttcatgaaggaacctggagtagagcgtgtgctccgagatcttcgcatcttccggatctttgaggggacaaatgacattcttcggctgtttgtggctctgcagggctgtatggacaaaggaaaggagctctctgggcttggcagtgctctaaagaatcccttcgggaatgctggcctcctgctaggagaggcaggcaaacagctgaggcggcgggcagggctgggcagcggcctgagtctcagcggacttgtccacccggagttgagtcggagtggcgagctggcagtacgggctctggagcagtttgccactgttgtggaggccaagctgataaaacacaagaaggggattgtcaatgaacagtttctgctgcagcggctggcagacggggccatcgacctctatgctatggtggtggttctctcgagggcctcaagatccctgagtgagggccaccccacggcccagcatgagaaaatgctctgtgacacctggtgtatcgaggctgcagctcggatccgagagggcatggccgccctgcagtctgacccctggcagcaagagctctaccgcaacttcaaaagcatctccaaggccttggtggagcggggtggtgtggtcaccagcaacccacttggcttc

SEQ ID NO: 498 - protein, 429 aa, Homo sapiens
  source 1..429: note = alpha-galactosidase A wt
MQLRNPELHLGCALALRFLALVSWDIPGARALDNGLARTPTMGWLHWERFMCNLDCQEEPDSCISEKLFMEMAELMVSEGWKDAGYEYLCIDDCWMAPQRDSEGRLQADPQRFPHGIRQLANYVHSKGLKLGIYADVGNKTCAGFPGSFGYYDIDAQTFADWGVDLLKFDGCYCDSLENLADGYKHMSLALNRTGRSIVYSCEWPLYMWPFQKPNYTEIRQYCNHWRNFADIDDSWKSIKSILDWTSFNQERIVDVAGPGGWNDPDMLVIGNFGLSWNQQVTQMALWAIMAAPLFMSNDLRHISPQAKALLQDKDVIAINQDPLGKQGYQLRQGDNFEVWERPLSGLAWAVAMINRQEIGGPRSYTIAVASLGKGVACNPACFITQLLPVKRKLGFYEWTSRLRSHINPTGTVLLQLENTMQMSLKDLL

SEQ ID NO: 499 - DNA, 1287 bp, Homo sapiens
  source 1..1287: mol_type = genomic DNA; note = alpha-galactosidase A wt
atgcagctgaggaacccagaactacatctgggctgcgcgcttgcgcttcgcttcctggccctcgtttcctgggacatccctggggctagagcactggacaatggattggcaaggacgcctaccatgggctggctgcactgggagcgcttcatgtgcaaccttgactgccaggaagagccagattcctgcatcagtgagaagctcttcatggagatggcagagctcatggtctcagaaggctggaaggatgcaggttatgagtacctctgcattgatgactgttggatggctccccaaagagattcagaaggcagacttcaggcagaccctcagcgctttcctcatgggattcgccagctagctaattatgttcacagcaaaggactgaagctagggatttatgcagatgttggaaataaaacctgcgcaggcttccctgggagttttggatactacgacattgatgcccagacctttgctgactggggagtagatctgctaaaatttgatggttgttactgtgacagtttggaaaatttggcagatggttataagcacatgtccttggccctgaataggactggcagaagcattgtgtactcctgtgagtggcctctttatatgtggccctttcaaaagcccaattatacagaaatccgacagtactgcaatcactggcgaaattttgctgacattgatgattcctggaaaagtataaagagtatcttggactggacatcttttaaccaggagagaattgttgatgttgctggaccagggggttggaatgacccagatatgttagtgattggcaactttggcctcagctggaatcagcaagtaactcagatggccctctgggctatcatggctgctcctttattcatgtctaatgacctccgacacatcagccctcaagccaaagctctccttcaggataaggacgtaattgccatcaatcaggaccccttgggcaagcaagggtaccagcttagacagggagacaactttgaagtgtgggaacgacctctctcaggcttagcctgggctgtagctatgataaaccggcaggagattggtggacctcgctcttataccatcgcagttgcttccctgggtaaaggagtggcctgtaatcctgcctgcttcatcacacagctcctccctgtgaaaaggaagctagggttctatgaatggacttcaaggttaagaagtcacataaatcccacaggcactgttttgcttcagctagaaaatacaatgcagatgtcattaaaagacttactt

SEQ ID NO: 500 - protein, 200 aa, Homo sapiens
  source 1..200: note = ciliary neurotrophic factor  wt
MAFTEHSPLTPHRRDLCSRSIWLARKIRSDLTALTESYVKHQGLNKNINLDSADGMPVASTDQWSELTEAERLQENLQAYRTFHVLLARLLEDQQVHFTPTEGDFHQAIHTLLLQVAAFAYQIEELMILLEYKIPRNEADGMPINVGDGGLFEKKLWGLKVLQELSQWTVRSIHDLRFISSHQTGIPARGSHYIANNKKM

SEQ ID NO: 501 - DNA, 600 bp, Homo sapiens
  source 1..600: mol_type = genomic DNA; note = ciliary neurotrophic factor  wt
atggctttcacagagcattcaccgctgacccctcaccgtcgggacctctgtagccgctctatctggctagcaaggaagattcgttcagacctgactgctcttacggaatcctatgtgaagcatcagggcctgaacaagaacatcaacctggactctgcggatgggatgccagtggcaagcactgatcagtggagtgagctgaccgaggcagagcgactccaagagaaccttcaagcttatcgtaccttccatgttttgttggccaggctcttagaagaccagcaggtgcattttaccccaaccgaaggtgacttccatcaagctatacatacccttcttctccaagtcgctgcctttgcataccagatagaggagttaatgatactcctggaatacaagatcccccgcaatgaggctgatgggatgcctattaatgttggagatggtggtctctttgagaagaagctgtggggcctaaaggtgctgcaggagctttcacagtggacagtaaggtccatccatgaccttcgtttcatttcttctcatcagactgggatcccagcacgtgggagccattatattgctaacaacaagaaaatg

SEQ ID NO: 502 - protein, 653 aa, Homo sapiens
  source 1..653: note = Rab escort protein 1 wt
MADTLPSEFDVIVIGTGLPESIIAAACSRSGRRVLHVDSRSYYGGNWASFSFSGLLSWLKEYQENSDIVSDSPVWQDQILENEEAIALSRKDKTIQHVEVFCYASQDLHEDVEEAGALQKNHALVTSANSTEAADSAFLPTEDESLSTMSCEMLTEQTPSSDPENALEVNGAEVTGEKENHCDDKTCVPSTSAEDMSENVPIAEDTTEQPKKNRITYSQIIKEGRRFNIDLVSKLLYSRGLLIDLLIKSNVSRYAEFKNITRILAFREGRVEQVPCSRADVFNSKQLTMVEKRMLMKFLTFCMEYEKYPDEYKGYEEITFYEYLKTQKLTPNLQYIVMHSIAMTSETASSTIDGLKATKNFLHCLGRYGNTPFLFPLYGQGELPQCFCRMCAVFGGIYCLRHSVQCLVVDKESRKCKAIIDQFGQRIISEHFLVEDSYFPENMCSRVQYRQISRAVLITDRSVLKTDSDQQISILTVPAEEPGTFAVRVIELCSSTMTCMKGTYLVHLTCTSSKTAREDLESVVQKLFVPYTEMEIENEQVEKPRILWALYFNMRDSSDISRSCYNDLPSNVYVCSGPDCGLGNDNAVKQAETLFQEICPNEDFCPPPPNPEDIILDGDSLQPEASESSAIPEANSETFKESTNLGNLEESSE

SEQ ID NO: 503 - DNA, 1959 bp, Homo sapiens
  source 1..1959: mol_type = genomic DNA; note = Rab escort protein 1 wt
atggcggatactctcccttcggagtttgatgtgatcgtaatagggacgggtttgcctgaatccatcattgcagctgcatgttcaagaagtggccggagagttctgcatgttgattcaagaagctactatggaggaaactgggccagttttagcttttcaggactattgtcctggctaaaggaataccaggaaaacagtgacattgtaagtgacagtccagtgtggcaagaccagatccttgaaaatgaagaagccattgctcttagcaggaaggacaaaactattcaacatgtggaagtattttgttatgccagtcaggatttgcatgaagatgtcgaagaagctggtgcactgcagaaaaatcatgctcttgtgacatctgcaaactccacagaagctgcagattctgccttcctgcctacggaggatgagtcattaagcactatgagctgtgaaatgctcacagaacaaactccaagcagcgatccagagaatgcgctagaagtaaatggtgctgaagtgacaggggaaaaagaaaaccattgtgatgataaaacttgtgtgccatcaacttcagcagaagacatgagtgaaaatgtgcctatagcagaagataccacagagcaaccaaagaaaaacagaattacttactcacaaattattaaagaaggcaggagatttaatattgatttagtatcaaagctgctgtattctcgaggattactaattgatcttctaatcaaatctaatgttagtcgatatgcagagtttaaaaatattaccaggattcttgcatttcgagaaggacgagtggaacaggttccgtgttccagagcagatgtctttaatagcaaacaacttactatggtagaaaagcgaatgctaatgaaatttcttacattttgtatggaatatgagaaatatcctgatgaatataaaggatatgaagagatcacattttatgaatatttaaagactcaaaaattaacccccaacctccaatatattgtcatgcattcaattgcaatgacatcagagacagccagcagcaccatagatggtctcaaagctaccaaaaactttcttcactgtcttgggcggtatggcaacactccatttttgtttcctttatatggccaaggagaactcccccagtgtttctgcaggatgtgtgctgtgtttggtggaatttattgtcttcgccattcagtacagtgccttgtagtggacaaagaatccagaaaatgtaaagcaattatagatcagtttggtcagagaataatctctgagcatttcctcgtggaggacagttactttcctgagaacatgtgctcacgtgtgcaatacaggcagatctccagggcagtgctgattacagatagatctgtcctaaaaacagattcagatcaacagatttccattttgacagtgccagcagaggaaccaggaacttttgctgttcgggtcattgagttatgttcttcaacgatgacatgcatgaaaggcacctatttggttcatttgacttgcacatcttctaaaacagcaagagaagatttagaatcagttgtgcagaaattgtttgttccatatactgaaatggagatagaaaatgaacaagtagaaaagccaagaattctgtgggctctttacttcaatatgagagattcgtcagacatcagcaggagctgttataatgatttaccatccaacgtttatgtctgctctggcccagattgtggtttaggaaatgataatgcagtcaaacaggctgaaacacttttccaggaaatctgccccaatgaagatttctgtccccctccaccaaatcctgaagacattatccttgatggagacagtttacagccagaggcttcagaatccagtgccataccagaggctaactcggagactttcaaggaaagcacaaaccttggaaacctagaggagtcctctgaa

SEQ ID NO: 504 - protein, 533 aa, Homo sapiens
  source 1..533: note = retinal pigment epithelium-specific protein 65kDa  wt
MSIQVEHPAGGYKKLFETVEELSSPLTAHVTGRIPLWLTGSLLRCGPGLFEVGSEPFYHLFDGQALLHKFDFKEGHVTYHRRFIRTDAYVRAMTEKRIVITEFGTCAFPDPCKNIFSRFFSYFRGVEVTDNALVNVYPVGEDYYACTETNFITKINPETLETIKQVDLCNYVSVNGATAHPHIENDGTVYNIGNCFGKNFSIAYNIVKIPPLQADKEDPISKSEIVVQFPCSDRFKPSYVHSFGLTPNYIVFVETPVKINLFKFLSSWSLWGANYMDCFESNETMGVWLHIADKKRKKYLNNKYRTSPFNLFHHINTYEDNGFLIVDLCCWKGFEFVYNYLYLANLRENWEEVKKNARKAPQPEVRRYVLPLNIDKADTGKNLVTLPNTTATAILCSDETIWLEPEVLFSGPRQAFEFPQINYQKYCGKPYTYAYGLGLNHFVPDRLCKLNVKTKETWVWQEPDSYPSEPIFVSHPDALEEDDGVVLSVVVSPGAGQKPAYLLILNAKDLSEVARAEVEINIPVTFHGLFKKS

SEQ ID NO: 505 - DNA, 1599 bp, Homo sapiens
  source 1..1599: mol_type = genomic DNA; note = retinal pigment epithelium-specific protein 65kDa  wt
atgtctatccaggttgagcatcctgctggtggttacaagaaactgtttgaaactgtggaggaactgtcctcgccgctcacagctcatgtaacaggcaggatccccctctggctcaccggcagtctccttcgatgtgggccaggactctttgaagttggatctgagccattttaccacctgtttgatgggcaagccctcctgcacaagtttgactttaaagaaggacatgtcacataccacagaaggttcatccgcactgatgcttacgtacgggcaatgactgagaaaaggatcgtcataacagaatttggcacctgtgctttcccagatccctgcaagaatatattttccaggtttttttcttactttcgaggagtagaggttactgacaatgcccttgttaatgtctacccagtgggggaagattactacgcttgcacagagaccaactttattacaaagattaatccagagaccttggagacaattaagcaggttgatctttgcaactatgtctctgtcaatggggccactgctcacccccacattgaaaatgatggaaccgtttacaatattggtaattgctttggaaaaaatttttcaattgcctacaacattgtaaagatcccaccactgcaagcagacaaggaagatccaataagcaagtcagagatcgttgtacaattcccctgcagtgaccgattcaagccatcttacgttcatagttttggtctgactcccaactatatcgtttttgtggagacaccagtcaaaattaacctgttcaagttcctttcttcatggagtctttggggagccaactacatggattgttttgagtccaatgaaaccatgggggtttggcttcatattgctgacaaaaaaaggaaaaagtacctcaataataaatacagaacttctcctttcaacctcttccatcacatcaacacctatgaagacaatgggtttctgattgtggatctctgctgctggaaaggatttgagtttgtttataattacttatatttagccaatttacgtgagaactgggaagaggtgaaaaaaaatgccagaaaggctccccaacctgaagttaggagatatgtacttcctttgaatattgacaaggctgacacaggcaagaatttagtcacgctccccaatacaactgccactgcaattctgtgcagtgacgagactatctggctggagcctgaagttctcttttcagggcctcgtcaagcatttgagtttcctcaaatcaattaccagaagtattgtgggaaaccttacacatatgcgtatggacttggcttgaatcactttgttccagataggctctgtaagctgaatgtcaaaactaaagaaacttgggtttggcaagagcctgattcatacccatcagaacccatctttgtttctcacccagatgccttggaagaagatgatggtgtagttctgagtgtggtggtgagcccaggagcaggacaaaagcctgcttatctcctgattctgaatgccaaggacttaagtgaagttgcccgggctgaagtggagattaacatccctgtcacctttcatggactgttcaaaaaatct

SEQ ID NO: 506 - protein, 1251 aa, Homo sapiens
  source 1..1251: note = ATPase, aminophospholipid transporter, class I, type 8B, member 1 wt
MSTERDSETTFDEDSQPNDEVVPYSDDETEDELDDQGSAVEPEQNRVNREAEENREPFRKECTWQVKANDRKYHEQPHFMNTKFLCIKESKYANNAIKTYKYNAFTFIPMNLFEQFKRAANLYFLALLILQAVPQISTLAWYTTLVPLLVVLGVTAIKDLVDDVARHKMDKEINNRTCEVIKDGRFKVAKWKEIQVGDVIRLKKNDFVPADILLLSSSEPNSLCYVETAELDGETNLKFKMSLEITDQYLQREDTLATFDGFIECEEPNNRLDKFTGTLFWRNTSFPLDADKILLRGCVIRNTDFCHGLVIFAGADTKIMKNSGKTRFKRTKIDYLMNYMVYTIFVVLILLSAGLAIGHAYWEAQVGNSSWYLYDGEDDTPSYRGFLIFWGYIIVLNTMVPISLYVSVEVIRLGQSHFINWDLQMYYAEKDTPAKARTTTLNEQLGQIHYIFSDKTGTLTQNIMTFKKCCINGQIYGDHRDASQHNHNKIEQVDFSWNTYADGKLAFYDHYLIEQIQSGKEPEVRQFFFLLAVCHTVMVDRTDGQLNYQAASPDEGALVNAARNFGFAFLARTQNTITISELGTERTYNVLAILDFNSDRKRMSIIVRTPEGNIKLYCKGADTVIYERLHRMNPTKQETQDALDIFANETLRTLCLCYKEIEEKEFTEWNKKFMAASVASTNRDEALDKVYEEIEKDLILLGATAIEDKLQDGVPETISKLAKADIKIWVLTGDKKETAENIGFACELLTEDTTICYGEDINSLLHARMENQRNRGGVYAKFAPPVQESFFPPGGNRALIITGSWLNEILLEKKTKRNKILKLKFPRTEEERRMRTQSKRRLEAKKEQRQKNFVDLACECSAVICCRVTPKQKAMVVDLVKRYKKAITLAIGDGANDVNMIKTAHIGVGISGQEGMQAVMSSDYSFAQFRYLQRLLLVHGRWSYIRMCKFLRYFFYKNFAFTLVHFWYSFFNGYSAQTAYEDWFITLYNVLYTSLPVLLMGLLDQDVSDKLSLRFPGLYIVGQRDLLFNYKRFFVSLLHGVLTSMILFFIPLGAYLQTVGQDGEAPSDYQSFAVTIASALVITVNFQIGLDTSYWTFVNAFSIFGSIALYFGIMFDFHSAGIHVLFPSAFQFTGTASNALRQPYIWLTIILAVAVCLLPVVAIRFLSMTIWPSESDKIQKHRKRLKAEEQWQRRQQVFRRGVSTRRSAYAFSHQRGYADLISSGRSIRKKRSPLDAIVADGTAEYRRTGDS

SEQ ID NO: 507 - DNA, 3753 bp, Homo sapiens
  source 1..3753: mol_type = genomic DNA; note = ATPase, aminophospholipid transporter, class I, type 8B, member 1 wt
atgagtacagaaagagactcagaaacgacatttgacgaggattctcagcctaatgacgaagtggttccctacagtgatgatgaaacagaagatgaacttgatgaccaggggtctgctgttgaaccagaacaaaaccgagtcaacagggaagcagaggagaaccgggagccattcagaaaagaatgtacatggcaagtcaaagcaaacgatcgcaagtaccacgaacaacctcactttatgaacacaaaattcttgtgtattaaggagagtaaatatgcgaataatgcaattaaaacatacaagtacaacgcatttacctttataccaatgaatctgtttgagcagtttaagagagcagccaatttatatttcctggctcttcttatcttacaggcagttcctcaaatctctaccctggcttggtacaccacactagtgcccctgcttgtggtgctgggcgtcactgcaatcaaagacctggtggacgatgtggctcgccataaaatggataaggaaatcaacaataggacgtgtgaagtcattaaggatggcaggttcaaagttgctaagtggaaagaaattcaagttggagacgtcattcgtctgaaaaaaaatgattttgttccagctgacattctcctgctgtctagctctgagcctaacagcctctgctatgtggaaacagcagaactggatggagaaaccaatttaaaatttaagatgtcacttgaaatcacagaccagtacctccaaagagaagatacattggctacatttgatggttttattgaatgtgaagaacccaataacagactagataagtttacaggaacactattttggagaaacacaagttttcctttggatgctgataaaattttgttacgtggctgtgtaattaggaacaccgatttctgccacggcttagtcatttttgcaggtgctgacactaaaataatgaagaatagtgggaaaaccagatttaaaagaactaaaattgattacttgatgaactacatggtttacacgatctttgttgttcttattctgctttctgctggtcttgccatcggccatgcttattgggaagcacaggtgggcaattcctcttggtacctctatgatggagaagacgatacaccctcctaccgtggattcctcattttctggggctatatcattgttctcaacaccatggtacccatctctctctatgtcagcgtggaagtgattcgtcttggacagagtcacttcatcaactgggacctgcaaatgtactatgctgagaaggacacacccgcaaaagctagaaccaccacactcaatgaacagctcgggcagatccattatatcttctctgataagacggggacactcacacaaaatatcatgacctttaaaaagtgctgtatcaacgggcagatatatggggaccatcgggatgcctctcaacacaaccacaacaaaatagagcaagttgattttagctggaatacatatgctgatgggaagcttgcattttatgaccactatcttattgagcaaatccagtcagggaaagagccagaagtacgacagttcttcttcttgctcgcagtttgccacacagtcatggtggataggactgatggtcagctcaactaccaggcagcctctcccgatgaaggtgccctggtaaacgctgccaggaactttggctttgccttcctcgccaggacccagaacaccatcaccatcagtgaactgggcactgaaaggacttacaatgttcttgccattttggacttcaacagtgaccggaagcgaatgtctatcattgtaagaaccccagaaggcaatatcaagctttactgtaaaggtgctgacactgttatttatgaacggttacatcgaatgaatcctactaagcaagaaacacaggatgccctggatatctttgcaaatgaaactcttagaaccctatgcctttgctacaaggaaattgaagaaaaagaatttacagaatggaataaaaagtttatggctgccagtgtggcctccaccaaccgggacgaagctctggataaagtatatgaggagattgaaaaagacttaattctcctgggagctacagctattgaagacaagctacaggatggagttccagaaaccatttcaaaacttgcaaaagctgacattaagatctgggtgcttactggagacaaaaaggaaactgctgaaaatataggatttgcttgtgaacttctgactgaagacaccaccatctgctatggggaggatattaattctcttcttcatgcaaggatggaaaaccagaggaatagaggtggcgtctacgcaaagtttgcacctcctgtgcaggaatctttttttccacccggtggaaaccgtgccttaatcatcactggttcttggttgaatgaaattcttctcgagaaaaagaccaagagaaataagattctgaagctgaagttcccaagaacagaagaagaaagacggatgcggacccaaagtaaaaggaggctagaagctaagaaagagcagcggcagaaaaactttgtggacctggcctgcgagtgcagcgcagtcatctgctgccgcgtcacccccaagcagaaggccatggtggtggacctggtgaagaggtacaagaaagccatcacgctggccatcggagatggggccaatgacgtgaacatgatcaaaactgcccacattggcgttggaataagtggacaagaaggaatgcaagctgtcatgtcgagtgactattcctttgctcagttccgatatctgcagaggctactgctggtgcatggccgatggtcttacataaggatgtgcaagttcctacgatacttcttttacaaaaactttgcctttactttggttcatttctggtactccttcttcaatggctactctgcgcagactgcatacgaggattggttcatcaccctctacaacgtgctgtacaccagcctgcccgtgctcctcatggggctgctcgaccaggatgtgagtgacaaactgagcctccgattccctgggttatacatagtgggacaaagagacttactattcaactataagagattctttgtaagcttgttgcatggggtcctaacatcgatgatcctcttcttcatacctcttggagcttatctgcaaaccgtagggcaggatggagaggcaccttccgactaccagtcttttgccgtcaccattgcctctgctcttgtaataacagtcaatttccagattggcttggatacttcttattggacttttgtgaatgctttttcaatttttggaagcattgcactttattttggcatcatgtttgactttcatagtgctggaatacatgttctctttccatctgcatttcaatttacaggcacagcttcaaacgctctgagacagccatacatttggttaactatcatcctggctgttgctgtgtgcttactacccgtcgttgccattcgattcctgtcaatgaccatctggccatcagaaagtgataagatccagaagcatcgcaagcggttgaaggcggaggagcagtggcagcgacggcagcaggtgttccgccggggcgtgtcaacgcggcgctcggcctacgccttctcgcaccagcggggctacgcggacctcatctcctccgggcgcagcatccgcaagaagcgctcgccgcttgatgccatcgtggcggatggcaccgcggagtacaggcgcaccggggacagc

SEQ ID NO: 508 - protein, 429 aa, Homo sapiens
  source 1..429: note = glucose-6-phosphate translocase wt, isoform 1
MAAQGYGYYRTVIFSAMFGGYSLYYFNRKTFSFVMPSLVEEIPLDKDDLGFITSSQSAAYAISKFVSGVLSDQMSARWLFSSGLLLVGLVNIFFAWSSTVPVFAALWFLNGLAQGLGWPPCGKVLRKWFEPSQFGTWWAILSTSMNLAGGLGPILATILAQSYSWRSTLALSGALCVVVSFLCLLLIHNEPADVGLRNLDPMPSEGKKGSLKEESTLQELLLSPYLWVLSTGYLVVFGVKTCCTDWGQFFLIQEKGQSALVGSSYMSALEVGGLVGSIAAGYLSDRAMAKAGLSNYGNPRHGLLLFMMAGMTVSMYLFRVTVTSDSPKLWILVLGAVFGFSSYGPIALFGVIANESAPPNLCGTSHAIVGLMANVGGFLAGLPFSTIAKHYSWSTAFWVAEVICAASTAAFFLLRNIRTKMGRVSKKAE

SEQ ID NO: 509 - DNA, 1287 bp, Homo sapiens
  source 1..1287: mol_type = genomic DNA; note = glucose-6-phosphate translocase wt, isoform 1
atggcagcccagggctatggctattatcgcactgtgatcttctcagccatgtttgggggctacagcctgtattacttcaatcgcaagaccttctcctttgtcatgccatcattggtggaagagatccctttggacaaggatgatttggggttcatcaccagcagccagtcggcagcttatgctatcagcaagtttgtcagtggggtgctgtctgaccagatgagtgctcgctggctcttctcttctgggctgctcctggttggcctggtcaacatattctttgcctggagctccacagtacctgtctttgctgccctctggttccttaatggcctggcccaggggctgggctggcccccatgtgggaaggtcctgcggaagtggtttgagccatctcagtttggcacttggtgggccatcctgtcaaccagcatgaacctggctggagggctgggccctatcctggcaaccatccttgcccagagctacagctggcgcagcacgctggccctatctggggcactgtgtgtggttgtctccttcctctgtctcctgctcatccacaatgaacctgctgatgttggactccgcaacctggaccccatgccctctgagggcaagaagggctccttgaaggaggagagcaccctgcaggagctgctgctgtccccttacctgtgggtgctctccactggttaccttgtggtgtttggagtaaagacctgctgtactgactggggccagttcttccttatccaggagaaaggacagtcagcccttgtaggtagctcctacatgagtgccctggaagttgggggccttgtaggcagcatcgcagctggctacctgtcagaccgggccatggcaaaggcgggactgtccaactacgggaaccctcgccatggcctgttgctgttcatgatggctggcatgacagtgtccatgtacctcttccgggtaacagtgaccagtgactcccccaagctctggatcctggtattgggagctgtatttggtttctcctcgtatggccccattgccctgtttggagtcatagccaacgagagtgcccctcccaacttgtgtggcacctcccacgccattgtgggactcatggccaatgtgggcggctttctggctgggctgcccttcagcaccattgccaagcactacagttggagcacagccttctgggtggctgaagtgatttgtgcggccagcacggctgccttcttcctcctacgaaacatccgcaccaagatgggccgagtgtccaagaaggctgag

SEQ ID NO: 510 - protein, 451 aa, Homo sapiens
  source 1..451: note = glucose-6-phosphate translocase wt, isoform 2
MAAQGYGYYRTVIFSAMFGGYSLYYFNRKTFSFVMPSLVEEIPLDKDDLGFITSSQSAAYAISKFVSGVLSDQMSARWLFSSGLLLVGLVNIFFAWSSTVPVFAALWFLNGLAQGLGWPPCGKVLRKWFEPSQFGTWWAILSTSMNLAGGLGPILATILAQSYSWRSTLALSGALCVVVSFLCLLLIHNEPADVGLRNLDPMPSEGKKGSLKEESTLQELLLSPYLWVLSTGYLVVFGVKTCCTDWGQFFLIQEKGQSALVGSSYMSALEVGGLVGSIAAGYLSDRAMAKAGLSNYGNPRHGLLLFMMAGMTVSMYLFRVTVTSDSPKDVAFWTLALHPLAELTGFTEHELWILVLGAVFGFSSYGPIALFGVIANESAPPNLCGTSHAIVGLMANVGGFLAGLPFSTIAKHYSWSTAFWVAEVICAASTAAFFLLRNIRTKMGRVSKKAE

SEQ ID NO: 511 - DNA, 1353 bp, Homo sapiens
  source 1..1353: mol_type = genomic DNA; note = glucose-6-phosphate translocase wt, isoform 2
atggcagcccagggctatggctattatcgcactgtgatcttctcagccatgtttgggggctacagcctgtattacttcaatcgcaagaccttctcctttgtcatgccatcattggtggaagagatccctttggacaaggatgatttggggttcatcaccagcagccagtcggcagcttatgctatcagcaagtttgtcagtggggtgctgtctgaccagatgagtgctcgctggctcttctcttctgggctgctcctggttggcctggtcaacatattctttgcctggagctccacagtacctgtctttgctgccctctggttccttaatggcctggcccaggggctgggctggcccccatgtgggaaggtcctgcggaagtggtttgagccatctcagtttggcacttggtgggccatcctgtcaaccagcatgaacctggctggagggctgggccctatcctggcaaccatccttgcccagagctacagctggcgcagcacgctggccctatctggggcactgtgtgtggttgtctccttcctctgtctcctgctcatccacaatgaacctgctgatgttggactccgcaacctggaccccatgccctctgagggcaagaagggctccttgaaggaggagagcaccctgcaggagctgctgctgtccccttacctgtgggtgctctccactggttaccttgtggtgtttggagtaaagacctgctgtactgactggggccagttcttccttatccaggagaaaggacagtcagcccttgtaggtagctcctacatgagtgccctggaagttgggggccttgtaggcagcatcgcagctggctacctgtcagaccgggccatggcaaaggcgggactgtccaactacgggaaccctcgccatggcctgttgctgttcatgatggctggcatgacagtgtccatgtacctcttccgggtaacagtgaccagtgactcccccaaggatgttgctttctggactctggctcttcaccctctcgcggagctcacaggctttacagagcatgagctctggatcctggtattgggagctgtatttggtttctcctcgtatggccccattgccctgtttggagtcatagccaacgagagtgcccctcccaacttgtgtggcacctcccacgccattgtgggactcatggccaatgtgggcggctttctggctgggctgcccttcagcaccattgccaagcactacagttggagcacagccttctgggtggctgaagtgatttgtgcggccagcacggctgccttcttcctcctacgaaacatccgcaccaagatgggccgagtgtccaagaaggctgag

SEQ ID NO: 512 - protein, 39 aa, Homo sapiens
  source 1..39: note = GLP-1
HGEGTFTSDLSKQMEEEAVRLFIEWLKNGGPSSGAPPPS

SEQ ID NO: 513 - protein, 39 aa, synthetic construct; identical to SEQ ID NO: 512
  source 1..39: note = exenatide

SEQ ID NO: 514 - protein, 55 aa, synthetic construct
  source 1..55: note = liraglutide
HAEGTFTSDVSSYLEGQAAKLINKEREFIAWLVRGRGWHEREINLINKERISYEC

SEQ ID NO: 515 - protein, 44 aa, synthetic construct
  source 1..44: note = lixisenatide
HGEGTFTSDLSKQMEEEAVRLFIEWLKNGGPSSGAPPSKKKKKK

SEQ ID NO: 516 - protein, 30 aa, synthetic construct
  source 1..30: note = taspoglutide
HUEGTFTSDVSSYLEGQAAKEFIAWLVKUR

SEQ ID NO: 517 - protein, 30 aa, synthetic construct
  source 1..30: note = albiglutide
HGEGTFTSDVSSYLEGQAAKEFIAWLVKGR

SEQ ID NO: 518 - protein, 30 aa, synthetic construct
  source 1..30: note = dulaglutide
HGEGTFTSDVSSYLEEQAAKEFIAWLVKGG

SEQ ID NO: 519 - protein, 62 aa, synthetic construct
  source 1..62: note = semaglutide
HUEGTFTSDVSSYLEGQAALINKEREFIAWLVRGRGWHEREINLINKERISPEGPEGYECOH

SEQ ID NO: 520 - protein, 548 aa, synthetic construct
  source 1..548: note = acmucabtagene autoleucel
DIQMTQTTSSLSASLGDRVTISCRASQDISKYLNWYQQKPDGTVKLLIYHTSRLHSGVPSRFSGSGSGTDYSLTISNLEQEDIATYFCQQGNTLPYTFGGGTKLEITGSTSGSGKPGSGEGSTKGEVKLQESGPGLVAPSQSLSVTCTVSGVSLPDYGVSWIRQPPRKGLEWLGVIWGSETTYYNSALKSRLTIIKDNSKSQVFLKMNSLQTDDTAIYYCAKHYYYGGSYAMDYWGQGTSVTVSSEQKLISEEDLNPGGGGGSGGGGSGGGGSGGGGSGSMDIQMTQSPSSLSASVGDRVTITCRASQDIRNYLNWYQQKPGKAPKLLIYYTSRLESGVPSRFSGSGSGTDYTLTISSLQPEDFATYYCQQGNTLPWTFGQGTKVEIKGGGGSGGGGSGGGGSEVQLVESGGGLVQPGGSLRLSCAASGYSFTGYTMNWVRQAPGKGLEWVALINPTKGVSTYNQKFKDRFTISVDKSKNTAYLQMNSLRAEDTAVYYCARSGYYGDSDWYFDVWGQGTLVTVSSTSGGGGSLESGQVLLESNIKVLP

SEQ ID NO: 521 - protein, 465 aa, synthetic construct
  source 1..465: note = anbalcabtagene autoleucel
DIQMTQTTSSLSASLGDRVTISCRASQDISKYLNWYQQKPDGTVKLLIYHTSRLHSGVPSRFSGSGSGTDYSLTISNLEQEDIATYFCQQGNTLPYTFGGGTKLEITGGGGSGGGGSGGGGSEVKLQESGPGLVAPSQSLSVTCTVSGVSLPDYGVSWIRQPPRKGLEWLGVIWGSETTYYNSALKSRLTIIKDNSKSQVFLKMNSLQTDDTAIYYCAKHYYYGGSYAMDYWGQGTSVTVSSTTTPAPRPPTPAPTIASQPLSLRPEACRPAAGGAVHTRGLDFACDIYIWAPLAGTCGVLLLSLVITLYCKRGRKKLLYIFKQPFMRPVQTTQEEDGCSCRFPEEEEGGCELRVKFSRSADAPAYQQGQNQLYNELNLGRREEYDVLDKRRGRDPEMGGKPRRKNPQEGLYNELQKDKMAEAYSEIGMKGERRRGKGHDGLYQGLSTATKDTYDALHMQALPPR

SEQ ID NO: 522 - protein, 467 aa, synthetic construct
  source 1..467: note = axicabtagene ciloleucel YESCARTA
DIQMTQTTSSLSASLGDRVTISCRASQDISKYLNWYQQKPDGTVKLLIYHTSRLHSGVPSRFSGSGSGTDYSLTISNLEQEDIATYFCQQGNTLPYTFGGGTKLEITGSTSGSGKPGSGEGSTKGEVKLQESGPGLVAPSQSLSVTCTVSGVSLPDYGVSWIRQPPRKGLEWLGVIWGSETTYYNSALKSRLTIIKDNSKSQVFLKMNSLQTDDTAIYYCAKHYYYGGSYAMDYWGQGTSVTVSSAAAIEVMYPPPYLDNEKSNGTIIHVKGKHLCPSPLFPGPSKPFWVLVVVGGVLACYSLLVTVAFIIFWVRSKRSRLLHSDYMNMTPRRPGPTRKHYQPYAPPRDFAAYRSRVKFSRSADAPAYQQGQNQLYNELNLGRREEYDVLDKRRGRDPEMGGKPRRKNPQEGLYNELQKDKMAEAYSEIGMKGERRRGKGHDGLYQGLSTATKDTYDALHMQALPPR

SEQ ID NO: 523 - protein, 465 aa, synthetic construct
  source 1..465: note = azercabtagene zapreleucel
DIQMTQTTSSLSASLGDRVTISCRASQDISKYLNWYQQKPDGTVKLLIYHTSRLHSGVPSRFSGSGSGTDYSLTISNLEQEDIATYFCQQGNTLPYTFGGGTKLEITGGGGSGGGGSGGGGSEVKLQESGPGLVAPSQSLSVTCTVSGVSLPDYGVSWIRQPPRKGLEWLGVIWGSETTYYNSALKSRLTIIKDNSKSQVFLKMNSLQTDDTAIYYCAKHYYYGGSYAMDYWGQGTSVTVSSTTTPAPRPPTPAPTIASQPLSLRPEACRPAAGGAVHTRGLDFACDIYIWAPLAGTCGVLLLSLVITLYCKASRKKAAAAAKSPFASPASSAQEEDASSCRAPSEEEGSCELRVKFSRSADAPAYQQGQNQLYNELNLGRREEYDVLDKRRGRDPEMGGKPRRKNPQEGLYNELQKDKMAEAYSEIGMKGERRRGKGHDGLYQGLSTATKDTYDALHMQALPPR

SEQ ID NO: 524 - protein, 467 aa, synthetic construct
  source 1..467: note = brexucabtagene autoleucel TECARTUS
DIQMTQTTSSLSASLGDRVTISCRASQDISKYLNWYQQKPDGTVKLLIYHTSRLHSGVPSRFSGSGSGTDYSLTISNLEQEDIATYFCQQGNTLPYTFGGGTKLEITGSTSGSGKPGSGEGSTKGEVKLQESGPGLVAPSQSLSVTCTVSGGSGGLITRLWCKLDSPASTKWLGVIWGSETTYYNSALKSRLTIIKDNSKSQVFLKMNSLQTDDTAIYYCAKHYYYGGSYAMDYWGQGTSVTVSSAAAIEVMYPPPYLDNEKSNGTIIHVKGKHLCPSPLFPGPSKPFWVLVVVGGVLACYSLLVTVAFIIFWVRSKRSRLLHSDYMNMTPRRPGPTRKHYQPYAPPRDFAAYRSRVKFSRSADAPAYQQGQNQLYNELNLGRREEYDVLDKRRGRDPEMGGKPRRKNPQEGLYNELQKDKMAEAYSEIGMKGERRRGKGHDGLYQGLSTATKDTYDALHMQALPPR

SEQ ID NO: 525 - protein, 475 aa, synthetic construct
  source 1..475: note = cemacabtagene ansegedleucel
EVQLQQSGPELIKPGASVKMSCKASGYTFTSYVMHWVKQKPGQGLEWIGYINPYNDGTKYNEKFKGKATLTSDKSSSTAYMELSSLTSEDSAVYYCARGTYYYGSRVFDYWGQGTTLTVSSGGGGSGGGGSGGGGSDIVMTQAAPSIPVTPGESVSISCRSSKSLLNSNGNTYLYWFLQRPGQSPQLLIYRMSNLASGVPDRFSGSGSGTAFTLRISRVEAEDVGVYYCMQHLEYPFTFGAGTKLELKRSDPTTTPAPRPPTPAPTIASQPLSLRPEACRPAAGGAVHTRGLDFACDIYIWAPLAGTCGVLLLSLVITLYCKRGRKKLLYIFKQPFMRPVQTTQEEDGCSCRFPEEEEGGCELRVKFSRSADAPAYQQGQNQLYNELNLGRREEYDVLDKRRGRDPEMGGKPRRKNPQEGLYNELQKDKMAEAYSEIGMKGERRRGKGHDGLYQGLSTATKDTYDALHMQALPPR

SEQ ID NO: 526 - protein, 484 aa, synthetic construct
  source 1..484: note = evoncabtagene pazurgedleucel
DIQMTQTTSSLSASLGDRVTISCRASQDISKYLNWYQQKPDGTVKLLIYHTSRLHSGVPSRFSGSGSGTDYSLTISNLEQEDIATYFCQQGNTLPYTFGGGTKLEITGSTSGSGKPGSGEGSTKGEVKLQESGPGLVAPSQSLSVTCTVSGVSLPDYGVSWIRQPPRKGLEWLGVIWGSETTYYNSALKSRLTIIKDNSKSQVFLKMNSLQTDDTAIYYCAKHYYYGGSYAMDYWGQGTSVTVSSAAAFVPVFLPAKPTTTPAPRPPTPAPTIASQPLSLRPEACRPAAGGAVHTRGLDFACDIYIWAPLAGTCGVLLLSLVITLYCNHRNRSKRSRLLHSDYMNMTPRRPGPTRKHYQPYAPPRDFAAYRSRVKFSRSADAPAYQQGQNQLYNELNLGRREEYDVLDKRRGRDPEMGGKPRRKNPQEGLYNELQKDKMAEAYSEIGMKGERRRGKGHDGLYQGLSTATKDTYDALHMQALPPR

SEQ ID NO: 527 - protein, 470 aa, synthetic construct
  source 1..470: note = inaticabtagene autoleucel
DIVLTQSPKFMSTSVGDRVSVTCKASQNVGTNVAWYQQKPGQSPKPLIYSATYRNSGVPDRFTGSGSGTDFTLTITNVQSKDLADYFCQQYNRYPYTSGGGTKLEIKRGGGGSGGGGSGGGGSQVQLQQSGAELVRPGSSVKISCKASGYAFSSYWMNWVKQRPGQGLEWIGQIYPGDGDTNYNGKFKGQATLTADKSSSTAYMQLSGLTSEDSAVYFCARKTISSVVDFYFDYWGQGTTLTVSSEFTTTPAPRPPTPAPTIASQPLSLRPEACRPAAGGAVHTRGLDFACDIYIWAPLAGTCGVLLLSLVITLYCKRGRKKLLYIFKQPFMRPVQTTQEEDGCSCRFPEEEEGGCELRVKFSRSADAPAYQQGQNQLYNELNLGRREEYDVLDKRRGRDPEMGGKPRRKNPQEGLYNELQKDKMAEAYSEIGMKGERRRGKGHDGLYQGLSTATKDTYDALHMQALPPR

SEQ ID NO: 528 - protein, 657 aa, synthetic construct
  source 1..657: note = lisocabtagene maraleucel BREYANZI
DIQMTQTTSSLSASLGDRVTISCRASQDISKYLNWYQQKPDGTVKLLIYHTSRLHSGVPSRFSGSGSGTDYSLTISNLEQEDIATYFCQQGNTLPYTFGGGTKLEITGSTSGSGKPGSGEGSTKGEVKLQESGPGLVAPSQSLSVTCTVSGVSLPDYGVSWIRQPPRKGLEWLGVIWGSETTYYNSALKSRLTIIKDNSKSQVFLKMNSLQTDDTAIYYCAKHYYYGGSYAMDYWGQGTSVTVSSESKYGPPCPPCPMFWVLVVVGGVLACYSLLVTVAFIIFWVKRGRKKLLYIFKQPFMRPVQTTQEEDGCSCRFPEEEEGGCELRVKFSRSADAPAYQQGQNQLYNELNLGRREEYDVLDKRRGRDPEMGGKPRRKNPQEGLYNELQKDKMAEAYSEIGMKGERRRGKGHDGLYQGLSTATKDTYDALHMQALPPRLEGGGEGRGSLLTCGDVEENPGPRMLLLVTSLLLCELPHPAFLLIPRKVCNGIGIGEFKDSLSINATNIKHFKNCTSISGDLHILPVAFRGDSFTHTPPLDPQELDILKTVKEITGFLLIQAWPENRTDLHAFENLEIIRGRTKQHGQFSLAVVSLNITSLGLRSLKEISDGDVIISGNKNLCYANTINWKKLFGTSGQKTKIISNRGENSCKATGQV

SEQ ID NO: 529 - protein, 406 aa, synthetic construct
  source 1..406: note = obecabtagene autoleucel
QVQLQQSGPELVKPGASVKISCKASGYAFSSSWMNWVKQRPGKGLEWIGRIYPGDEDTNYSGKFKDKATLTADKSSTTAYMQLSSLTSEDSAVYFCARSLLYGDYLDYWGQGTTLTVSSGGGGSGGGGSGGGGSQIVLTQSPAIMSASPGEKVTMTCSASSSVSYMHWYQQKSGTSPKRWIYDTSKLASGVPDRFSGSGSGTSYFLTINNMEAEDAATYYCQQWNINPLTFGAGTKLELKRSDPTTTPAPRPPTPAPTIASQPLSLRPEACRPAAGGAVHTRGLDFACDIYIWAPLAGTCGVLLLSLVITLYCKRGRKKLLYIFKQPFMRPVQTTQEEDGCSCRFPEEEEGGCELRVKFSRSADAPAYQQGQNQLYNELNLGRREEYDVLDKRRGRDPEMGGKPRR

SEQ ID NO: 530 - protein, 306 aa, synthetic construct
  source 1..306: note = anitocabtagene autoleucel
GSWSEFWARLGAIRERLDALGGSEAELAAFEKEIAAFESELQAYKGKGNPEVEKLRYTAGTIKRFLQAYRHNGGGGDGGGGSGTTTPAPRPPTPAPTIASQPLSLRPEACRPAAGGAVHTRGLDFACDIYIWAPLAGTCGVLLLSLVITLYCKRGRKKLLYIFKQPFMRPVQTTQEEDGCSCRFPEEEEGGCELRVKFSRSADAPAYKQGQNQLYNELNLGRREEYDVLDKRRGRDPEMGGKPRRKNPQEGLYNELQKDKMAEAYSEIGMKGERRRGKGHDGLYQGLSTATKDTYDALHMQALPPR

SEQ ID NO: 531 - protein, 467 aa, synthetic construct
  source 1..467: note = "ciltacabtagene autoleucel CARVYKTI
QVKLEESGGGLVQAGRSLRLSCAASEHTFSSHVMGWFRQAPGKERESVAVIGWRDISTSYADSVKGRFTISRDNAKKTLYLQMNSLKPEDTAVYYCAARRIDAADFDSWGQGTQVTVSSGGGGSEVQLVESGGGLVQAGGSLRLSCAASGRTFTMGWFRQAPGKEREFVAAISLSPTLAYYAESVKGRFTISRDNAKNTVVLQMNSLKPEDTALYYCAADRKSVMSIRPDYWGQGTQVTVSSTSTTTPAPRPPTPAPTIASQPLSLRPEACRPAAGGAVHTRGLDFACDIYIWAPLAGTCGVLLLSLVITLYCKRGRKKLLYIFKQPFMRPVQTTQEEDGCSCRFPEEEEGGCELRVKFSRSADAPAYQQGQNQLYNELNLGRREEYDVLDKRRGRDPEMGGKPRRKNPQEGLYNELQKDKMAEAYSEIGMKGERRRGKGHDGLYQGLSTATKDTYDALHMQALPPR

SEQ ID NO: 532 - protein, 472 aa, synthetic construct
  source 1..472: note = durcabtagene autoleucel
QVQLQESGGGVVQPGRSLRLSCAASGFTFSSYGMHWVRQAPGKGLEWVAVISYDGSNKYYADSVKGRFTISRDNSKNTLYLQMNSLRAEDTAVYYCGGSGYALHDDYYGLDVWGQGTLVTVSSGGGGSGGGGSGGGGSQSALTQPASVSGSPGQSITISCTGTSSDVGGYNYVSWYQQHPGKAPKLMIYDVSNRPSGVSNRFSGSKSGNTASLTISGLQAEDEADYYCSSYTSSSTLYVFGSGTKVTVLTTTPAPRPPTPAPTIASQPLSLRPEACRPAAGGAVHTRGLDFACDIYIWAPLAGTCGVLLLSLVITLYCKRGRKKLLYIFKQPFMRPVQTTQEEDGCSCRFPEEEEGGCELRVKFSRSADAPAYQQGQNQLYNELNLGRREEYDVLDKRRGRDPEMGGKPRRKNPQEGLYNELQKDKMAEAYSEIGMKGERRRGKGHDGLYQGLSTATKDTYDALHMQALPPR

SEQ ID NO: 533 - protein, 480 aa, synthetic construct
  source 1..480: note = equecabtagene autoleucel
DIQMTQSPSSLSASVGDRVTITCRASQSISSYLNWYQQKPGKAPKLLIYAASSLQSGVPSRFSGSGSGTDFTLTISSLQPEDFATYYCQQKYDLLTFGGGTKVEIKGSTSGSGKPGSGEGSTKGQLQLQESGPGLVKPSETLSLTCTVSGGSISSSSYYWGWIRQPPGKGLEWIGSISYSGSTYYNPSLKSRVTISVDTSKNQFSLKLSSVTAADTAVYYCARDRGDTILDVWGQGTMVTVSSFVPVFLPAKPTTTPAPRPPTPAPTIASQPLSLRPEACRPAAGGAVHTRGLDFACDIYIWAPLAGTCGVLLLSLVITLYCNHRNKRGRKKLLYIFKQPFMRPVQTTQEEDGCSCRFPEEEEGGCELRVKFSRSADAPAYQQGQNQLYNELNLGRREEYDVLDKRRGRDPEMGGKPRRKNPQEGLYNELQKDKMAEAYSEIGMKGERRRGKGHDGLYQGLSTATKDTYDALHMQALPPR

SEQ ID NO: 534 - protein, 501 aa, synthetic construct
  source 1..501: note = fencabtagene autoleucel
SRGSDLGKKLLEAARAGQDDEVRILMANGADVNAKDEYGLTPLYLATAHGHLEIVEVLLKNGADVNAVDAIGFTPLHLAAFIGHLEIAEVLLKHGADVNAQDKFGKTAFDISIGNGNEDLAEILQKLNEQKLISEEDLNPGGGGGSGGGGSGGGGSGGGGSGSMDIQMTQSPSSLSASVGDRVTITCRASQDIRNYLNWYQQKPGKAPKLLIYYTSRLESGVPSRFSGSGSGTDYTLTISSLQPEDFATYYCQQGNTLPWTFGQGTKVEIKGGGGSGGGGSGGGGSEVQLVESGGGLVQPGGSLRLSCAASGYSFTGYTMNWVRQAPGKGLEWVALINPYKGVSTYNQKFKDRFTISVDKSKNTAYLQMNSLRAEDTAVYYCARSGYYGDSDWYFDVWGQGTLVTVSSTSGGGGSLESGQVLLESNIKVLPTWSTPVQPMALIVLGGVAGLLLFIGLGIFFCVRCRHRRRQAERMSQIKRLLSEKKTCQCPHRFQKTCSPI

SEQ ID NO: 535 - protein, 462 aa, synthetic construct
  source 1..462: note = firicabtagene autoleucel
QVQLQQSGPGLVKPSQTLSLTCAISGDSVSSNSAAWNWIRQSPSRGLEWLGRTYYRSKWYNDYAVSVKSRITINPDTSKNQFSLQLNSVTPEDTAVYYCAREVTGDLEDAFDIWGQGTMVTVSSGGGGSDIQMTQSPSSLSASVGDRVTITCRASQTIWSYLNWYQQRPGKAPNLLIYAASSLQSGVPSRFSGRGSGTDFTLTISSLQAEDFATYYCQQSYSIPQTFGQGTKLEIKAAATTTPAPRPPTPAPTIASQPLSLRPEACRPAAGGAVHTRGLDFACDIYIWAPLAGTCGVLLLSLVITLYCKRGRKKLLYIFKQPFMRPVQTTQEEDGCSCRFPEEEEGGCELRVKFSRSADAPAYKQGQNQLYNELNLGRREEYDVLDKRRGRDPEMGGKPRRKNPQEGLYNELQKDKMAEAYSEIGMKGERRRGKGHDGLYQGLSTATKDTYDALHMQALPPR

SEQ ID NO: 536 - protein, 316 aa, synthetic construct
  source 1..316: note = gavocabtagene autoleucel
EVQLVESGGGLVQPGGSLRLSCAASGGDWSANFMYWYRQAPGKQRELVARISGRGVVDYVESVKGRFTISRDNSKNTLYLQMNSLRAEDTAVYYCAVASYWGQGTLVTVSSAAAGGGGSGGGGSGGGGSLEDGNEEMGGITQTPYKVSISGTTVILTCPQYPGSEILWQHNDKNIGGDEDDKNIGSDEDHLSLKEFSELEQSGYYVCYPRGSKPEDANFYLYLRARVCENCMEMDVMSVATIVIVDICITGGLLLLVYYWSKNRKAKAKPVTRGAGAGGRQRGQNKERPPPVPNPDYEPIRKGQRDLYSGLNQRRI

SEQ ID NO: 537 - protein, 472 aa, synthetic construct
  source 1..472: note = idecabtagene vicleucel
DIVLTQSPPSLAMSLGKRATISCRASESVTILGSHLIHWYQQKPGQPPTLLIQLASNVQTGVPARFSGSGSRTDFTLTIDPVEEDDVAVYYCLQSRTIPRTFGGGTKLEIKGSTSGSGKPGSGEGSTKGQIQLVQSGPELKKPGETVKISCKASGYTFTDYSINWVKRAPGKGLKWMGWINTETREPAYAYDFRGRFAFSLETSASTAYLQINNLKYEDTATYFCALDYSYAMDYWGQGTSVTVSSAAATTTPAPRPPTPAPTIASQPLSLRPEACRPAAGGAVHTRGLDFACDIYIWAPLAGTCGVLLLSLVITLYCKRGRKKLLYIFKQPFMRPVQTTQEEDGCSCRFPEEEEGGCELRVKFSRSADAPAYQQGQNQLYNELNLGRREEYDVLDKRRGRDPEMGGKPRRKNPQEGLYNELQKDKMAEAYSEIGMKGERRRGKGHDGLYQGLSTATKDTYDALHMQALPPR

SEQ ID NO: 538 - protein, 666 aa, synthetic construct
  source 1..666: note = itezocabtagene autoleucel
QVQLQQSGAELARPGASVKMSCKASGYTFTTYTIHWVRRRPGHDLEWIGYINPSSGCSDYNQNFKGKTTLTADKSSNTAYMQLNSLTSEDSAVYYCARRADYGNYEYTWFAYWGQGTTVTVSSSGGGSGGGGSGGGGSVIELTQSPKFMSTSVGDRVNVTYKASQNVGTNVAWFQQKPGQSPKVLIYSASYRYSGVPDRFTGSGSGTDFTLTISNVQSEDLAEYFCQQYHTYPLTFGGGTKLEIKRSDPAEPKSPDKTHTCPPCPAPELLGGPSVFLFPPKPKDTLMISRTPEVTCVVVDVSHEDPEVKFNWYVDGVEVHNAKTKPREEQYNSTYRVVSVLTVLHQDWLNGKEYKCKVSNKALPAPIEKTISKAKGQPREPQVYTLPPSRDELTKNQVSLTCLVKGFYPSDIAVEWESNGQPENNYKTTPPVLDSDGSFFLYSKLTVDKSRWQQGNVFSCSVMHEALHNHYTQKSLSLSPGKKDPKFWVLVVVGGVLACYSLLVTVAFIIFWVRSKRSRLLHSDYMNMTPRRPGPTRKHYQPYAPPRDFAAYRSRVKFSRSADAPAYQQGQNQLYNELNLGRREEYDVLDKRRGRDPEMGGKPRRKNPQEGLYNELQKDKMAEAYSEIGMKGERRRGKGHDGLYQGLSTATKDTYDALHMQALPPR

SEQ ID NO: 539 - protein, 487 aa, synthetic construct
  source 1..487: note = motacabtagene lurevgedleucel
QVQLVQSGAELKKPGASVKVSCKASGNTLTNYVIHWVRQAPGQRLEWMGYILPYNDLTKYSQKFQGRVTITRDKSASTAYMELSSLRSEDTAVYYCTRWDWDGFFDPWGQGTTVTVSSGGGGSGGGGSGGGGSEIVMTQSPATLSVSPGERASISCRASQSLVHSNGNTHLHWYQQRPGQAPRLLIYSVSNRFSEVPARFSGSGSGTDFTLTISSVESEDFAVYYCSQTSHIPYTFGGGTKLEIKSAAAFVPVFLPAKPTTTPAPRPPTPAPTIASQPLSLRPEACRPAAGGAVHTRGLDFACDIYIWAPLAGTCGVLLLSLVITLYCNHRNRKRGRKKLLYIFKQPFMRPVQTTQEEDGCSCRFPEEEEGGCELRVKFSRSADAPAYQQGQNQLYNELNLGRREEYDVLDKRRGRDPEMGGKPRRKNPQEGLYNELQKDKMAEAYSEIGMKGERRRGKGHDGLYQGLSTATKDTYDALHMQALPPR

SEQ ID NO: 540 - protein, 406 aa, synthetic construct; identical to SEQ ID NO: 529
  source 1..406: note = obecabtagene autoleucel

SEQ ID NO: 541 - protein, 1035 aa, synthetic construct
  source 1..1035: note = orvacabtagene autoleucel
QSALTQPASVSASPGQSIAISCTGTSSDVGWYQQHPGKAPKLMIYEDSKRPSGVSNRFSGSKSGNTASLTISGLQAEDEADYYCSSNTRSSTLVFGGGTKLTVLGSRGGGGSGGGGSGGGGSLEMAEVQLVQSGAEMKKPGASLKLSCKASGYTFIDYYVYWMRQAPGQGLESMGWINPNSGGTNYAQKFQGRVTMTRDTSISTAYMELSRLRSDDTAMYYCARSQRDGYMDYWGQGTLVTVSSESKYGPPCPPCPAPPVAGPSVFLFPPKPKDTLMISRTPEVTCVVVDVSQEDPEVQFNWYVDGVEVHNAKTKPREEQFQSTYRVVSVLTVLHQDWLNGKEYKCKVSNKGLPSSIEKTISKAKGQPREPQVYTLPPSQEEMTKNQVSLTCLVKGFYPSDIAVEWESNGQPENNYKTTPPVLDSDGSFFLYSRLTVDKSRWQEGNVFSCSVMHEALHNHYTQKSLSLSLGKMFWVLVVVGGVLACYSLLVTVAFIIFWVKRGRKKLLYIFKQPFMRPVQTTQEEDGCSCRFPEEEEGGCELRVKFSRSADAPAYQQGQNQLYNELNLGRREEYDVLDKRRGRDPEMGGKPRRKNPQEGLYNELQKDKMAEAYSEIGMKGERRRGKGHDGLYQGLSTATKDTYDALHMQALPPRLEGGGEGRGSLLTCGDVEENPGPRMLLLVTSLLLCELPHPAFLLIPRKVCNGIGIGEFKDSLSINATNIKHFKNCTSISGDLHILPVAFRGDSFTHTPPLDPQELDILKTVKEITGFLLIQAWPENRTDLHAFENLEIIRGRTKQHGQFSLAVVSLNITSLGLRSLKEISDGDVIISGNKNLCYANTINWKKLFGTSGQKTKIISNRGENSCKATGQVCHALCSPEGCWGPEPRDCVSCRNVSRGRECVDKCNLLEGEPREFVENSECIQCHPECLPQAMNITCTGRGPDNCIQCAHYIDGPHCVKTCPAGVMGENNTLVWKYADAGHVCHLCHPNCTYGCTGPGLEGCPTNGPKIPSIATGMVGALLLLLVVALGIGLFM

SEQ ID NO: 542 - protein, 447 aa, synthetic construct
  source 1..447: note = plixacabtagene autoleucel
DIQMTQTTSSLSASLGDRVTISCRASQDISKYLNWYQQKPDGTVKLLIYHTSRLHSGVPSRFSGSGSGTDYSLTISNLEQEDIATYFCQQGNTLPYTFGGGTKLEITGGGGSGGGGSGGGGSEVKLQESGPGLVAPSQSLSVTCTVSGVSLPDYGVSWIRQPPRKGLEWLGVIWGSETTYYNSALKSRLTIIKDNSKSQVFLKMNSLQTDDTAIYYCAKHYYYGGSYAMDYWGQGTSVTVSSAAAGGGGSGGGGSGGGGSLEDGNEEMGGITQTPYKVSISGTTVILTCPQYPGSEILWQHNDKNIGGDEDDKNIGSDEDHLSLKEFSELEQSGYYVCYPRGSKPEDANFYLYLRARVCENCMEMDVMSVATIVIVDICITGGLLLLVYYWSKNRKAKAKPVTRGAGAGGRQRGQNKERPPPVPNPDYEPIRKGQRDLYSGLNQRRI

SEQ ID NO: 543 - protein, 527 aa, synthetic construct
  source 1..527: note = pomlucabtagene autoleucel
DIQLTQSPSSLSASPGDRVTITCSASSSVSYMHWFQQKPGKAPKLWIYSTSNLASGVPARFSGSGSGTSYSLTISRLQPEDIATYYCQQRSSYPYTFGGGTKVEIKGGGGSGGGGSGGGGSEVQLVQSGAEVKKPGASVKVSCKASGYTFTDYNMDWVKQSPGQGLEWMGYIYPNNGGTGYNQKFKSKVTITVDTSTSTAYMELHSLRSEDTAVYYCATYGHYYGYMFAYWGQGTLVTVSSAAAFVPVFLPAKPTTTPAPRPPTPAPTIASQPLSLRPEACRPAAGGAVHTRGLDFACDIYIWAPLAGTCGVLLLSLVITLYCNHRNRSKRSRLLHSDYMNMTPRRPGPTRKHYQPYAPPRDFAAYRSRFSVVKRGRKKLLYIFKQPFMRPVQTTQEEDGCSCRFPEEEEGGCELRVKFSRSADAPAYQQGQNQLYNELNLGRREEYDVLDKRRGRDPEMGGKPRRKNPQEGLYNELQKDKMAEAYSEIGMKGERRRGKGHDGLYQGLSTATKDTYDALHMQALPPR

SEQ ID NO: 544 - protein, 691 aa, synthetic construct
  source 1..691: note = prizloncabtagene autoleucel
EIVLTQSPATLSLSPGERATLSCRASQSVSSYLAWYQQKPGQAPRLLIYDASNRATGIPARFSGSGSGTDFTLTISSLEPEDFAVYYCQQRSNWPITFGQGTRLEIKGSTSGGGSGGGSGGGGSSEVQLVESGGGLVQPGRSLRLSCAASGFTFNDYAMHWVRQAPGKGLEWVSTISWNSGSIGYADSVKGRFTISRDNAKKSLYLQMNSLRAEDTALYYCAKDIQYGNYYYGMDVWGQGTTVTVSSGGGGSEVKLQESGPGLVAPSQSLSVTCTVSGVSLPDYGVSWIRQPPRKGLEWLGVIWGSETTYYNSALKSRLTIIKDNSKSQVFLKMNSLQTDDTAIYYCAKHYYYGGSYAMDYWGQGTSVTVSSGSTSGSGKPGSGEGSTKGDIQMTQTTSSLSASLGDRVTISCRASQDISKYLNWYQQKPDGTVKLLIYHTSRLHSGVPSRFSGSGSGTDYSLTISNLEQEDIATYFCQQGNTLPYTFGGGTKLEITESKYGPPCPPCPMFWVLVVVGGVLACYSLLVTVAFIIFWVKRGRKKLLYIFKQPFMRPVQTTQEEDGCSCRFPEEEEGGCELRVKFSRSADAPAYQQGQNQLYNELNLGRREEYDVLDKRRGRDPEMGGKPRRKNPQEGLYNELQKDKMAEAYSEIGMKGERRRGKGHDGLYQGLSTATKDTYDALHMQALPPR

SEQ ID NO: 545 - protein, 465 aa, synthetic construct
  source 1..465: note = rapcabtagene autoleucel
DIQMTQTTSSLSASLGDRVTISCRASQDISKYLNWYQQKPDGTVKLLIYHTSRLHSGVPSRFSGSGSGTDYSLTISNLEQEDIATYFCQQGNTLPYTFGGGTKLEITGGGGSGGGGSGGGGSEVKLQESGPGLVAPSQSLSVTCTVSGVSLPDYGVSWIRQPPRKGLEWLGVIWGSETTYYNSALKSRLTIIKDNSKSQVFLKMNSLQTDDTAIYYCAKHYYYGGSYAMDYWGQGTSVTVSSTTTPAPRPPTPAPTIASQPLSLRPEACRPAAGGAVHTRGLDFACDIYIWAPLAGTCGVLLLSLVITLYCKRGRKKLLYIFKQPFMRPVQTTQEEDGCSCRFPEEEEGGCELRVKFSRSADAPAYKQGQNQLYNELNLGRREEYDVLDKRRGRDPEMGGKPRRKNPQEGLYNELQKDKMAEAYSEIGMKGERRRGKGHDGLYQGLSTATKDTYDALHMQALPPR

SEQ ID NO: 546 - protein, 820 aa, synthetic construct
  source 1..820: note = relmacabtagene autoleucel
DIQMTQTTSSLSASLGDRVTISCRASQDISKYLNWYQQKPDGTVKLLIYHTSRLHSGVPSRFSGSGSGTDYSLTISNLEQEDIATYFCQQGNTLPYTFGGGTKLEITGSTSGSGKPGSGEGSTKGEVKLQESGPGLVAPSQSLSVTCTVSGVSLPDYGVSWIRQPPRKGLEWLGVIWGSETTYYNSALKSRLTIIKDNSKSQVFLKMNSLQTDDTAIYYCAKHYYYGGSYAMDYWGQGTSVTVSSESKYGPPCPPCPMFWVLVVVGGVLACYSLLVTVAFIIFWVKRGRKKLLYIFKQPFMRPVQTTQEEDGCSCRFPEEEEGGCELRVKFSRSADAPAYQQGQNQLYNELNLGRREEYDVLDKRRGRDPEMGGKPRRKNPQEGLYNELQKDKMAEAYSEIGMKGERRRGKGHDGLYQGLSTATKDTYDALHMQALPPRLEGGGEGRGSLLTCGDVEENPGPRMLLLVTSLLLCELPHPAFLLIPRKVCNGIGIGEFKDSLSINATNIKHFKNCTSISGDLHILPVAFRGDSFTHTPPLDPQELDILKTVKEITGFLLIQAWPENRTDLHAFENLEIIRGRTKQHGQFSLAVVSLNITSLGLRSLKEISDGDVIISGNKNLCYANTINWKKLFGTSGQKTKIISNRGENSCKATGQVCHALCSPEGCWGPEPRDCVSCRNVSRGRECVDKCNLLEGEPREFVENSECIQCHPECLPQAMNITCTGRGPDNCIQCAHYIDGPHCVKTCPAGVMGENNTLVWKYADAGHVCHLCHPNCTYGCTGPGLEGCPTNGPKIPSIATGMVGALLLLLVVALGIGLFM

SEQ ID NO: 547 - protein, 348 aa, synthetic construct
  source 1..348: note = ribrecabtagene autoleucel
EVQLQASGGGLAQPGGSLRLSCAASGRTFSTYFMAWFRQPPGKGLEYVGGIRWSDGVPHYADSVKGRFTISRDNAKNTVYLQMNSLRAEDTAVYFCASRGIADGSDFGSYGQGTQVTVSSPAKPTTTPAPRPPTPAPTIASQPLSLRPEACRPAAGGAVHTRGLDFACDIYIWAPLAGTCGVLLLSLVITLYCKRGRKKLLYIFKQPFMRPVQTTQEEDGCSCRFPEEEEGGCELRVKFSRSADAPAYQQGQNQLYNELNLGRREEYDVLDKRRGRDPEMGGKPQRRKNPQEGLYNELQKDKMAEAYSEIGMKGERRRGKGHDGLYQGLSTATKDTYDALHMQALPPR

SEQ ID NO: 548 - protein, 473 aa, synthetic construct
  source 1..473: note = satricabtagene autoleucel
QVQLQESGPGLIKPSQTLSLTCTVSGGSISSGYNWHWIRQPPGKGLEWIGYIHYTGSTNYNPALRSRVTISVDTSKNQFSLKLSSVTAADTAIYYCARIYNGNSFPYWGQGTTVTVSSGGGGSGGGGSGGGGSDIVMTQSPDSLAVSLGERATINCKSSQSLFNSGNQKNYLTWYQQKPGQPPKLLIYWASTRESGVPDRFSGSGSGTDFTLTISSLQAEDVAVYYCQNAYSFPYTFGGGTKLEIKRTTTPAPRPPTPAPTIASQPLSLRPEACRPAAGGAVHTRGLDFACDFWVLVVVGGVLACYSLLVTVAFIIFWVRSKRSRLLHSDYMNMTPRRPGPTRKHYQPYAPPRDFAAYRSRVKFSRSADAPAYQQGQNQLYNELNLGRREEYDVLDKRRGRDPEMGGKPQRRKNPQEGLYNELQKDKMAEAYSEIGMKGERRRGKGHDGLYQGLSTATKDTYDALHMQALPPR

SEQ ID NO: 549 - protein, 467 aa, synthetic construct; identical to SEQ ID NO: 522
  source 1..467: note = tebrocabtagene autoleucel

SEQ ID NO: 550 - protein, 724 aa, synthetic construct
  source 1..724: note = tinocabtagene autoleucel
QVQLQESGPGLVKPSGTLSLTCAVSGGSISSSNWWSWVRQPPGKGLEWIGEIYHSGSTNYNPSLKSRVTISVDKSKNQFSLKLSSVTAADTAVYYCARLPGYESAFDIWGQGTMVTVSSGGGGSQAVLTQPPSVSEAPRQRVTISCSGSSSNIGNNAVSWYQQLPGKAPKLLIYYDDLLPSGVSDRFSGSKSGTSASLAISGLQSEDEADYYCAAWDDSLNGWVFGGGTKVTVLGGSTSGSGKPGSGEGSTKGEVQLVQSGAEVKKPGESLKISCKGSGYSFTSYWIGWVRQMPGKGLEWMGIIYPGDSDTRYSPSFQGQVTISADKSISTAYLQWSSLKASDTAMYYCARLSYSWSSWYWDFWGQGTLVTVSSGGGGSEIVLTQSPGTLSLSPGERATLSCRASQSVSSSYLAWYQQKPGQAPRLLIYGASSRATGIPDRFSGSGSGTDFTLTISRLEPEDFAVYYCQQAGLFPYTFGGGTKVEIKFVPVFLPAKPTTTPAPRPPTPAPTIASQPLSLRPEACRPAAGGAVHTRGLDFACDIYIWAPLAGTCGVLLLSLVITLYCNHRNKRGRKKLLYIFKQPFMRPVQTTQEEDGCSCRFPEEEEGGCELRVKFSRSADAPAYQQGQNQLYNELNLGRREEYDVLDKRRGRDPEMGGKPRRKNPQEGLYNELQKDKMAEAYSEIGMKGERRRGKGHDGLYQGLSTATKDTYDALHMQALPPR

SEQ ID NO: 551 - protein, 476 aa, synthetic construct
  source 1..476: note = trovocabtagene autoleucel, chain A
DIQMTQSPSSLSASVGDRVTITCRASQGISNYLNWYQQKPGKAPKPLIYYTSNLQSGVPSRFSGSGSGTDYTLTISSLQPEDFATYYCMGQTISSYTFGQGTKLEIKGGGGSGGGGSGGGGSEVQLVESGGGLVQPGGSLRLSCAASGFTFSNFDMAWVRQAPGKGLVWVSSITTGADHAIYADSVKGRFTISRDNAKNTLYLQMNSLRAEDTAVYYCVRHGYYDGYHLFDYWGQGTLVTVSSFVPVFLPAKPTTTPAPRPPTPAPTIASQPLSLRPEACRPAAGGAVHTRGLDFACDIYIWAPLAGTCGVLLLSLVITLYCKRGRKKLLYIFKQPFMRPVQTTQEEDGCSCRFPEEEEGGCELRVKFSRSADAPAYQQGQNQLYNELNLGRREEYDVLDKRRGRDPEMGGKPRRKNPQEGLYNELQKDKMAEAYSEIGMKGERRRGKGHDGLYQGLSTATKDTYDALHMQALPPR

SEQ ID NO: 552 - protein, 476 aa, synthetic construct; identical to SEQ ID NO: 551
  source 1..476: note = trovocabtagene autoleucel, chain B

SEQ ID NO: 553 - protein, 467 aa, synthetic construct
  source 1..467: note = vadacabtagene leraleucel, chain A
EVKLQQSGAELVRPGSSVKISCKASGYAFSSYWMNWVKQRPGQGLEWIGQIYPGDGDTNYNGKFKGQATLTADKSSSTAYMQLSGLTSEDSAVYFCARKTISSVVDFYFDYWGQGTTVTVSSGGGGSGGGGSGGGGSDIELTQSPKFMSTSVGDRVSVTCKASQNVGTNVAWYQQKPGQSPKPLIYSATYRNSGVPDRFTGSGSGTDFTLTITNVQSKDLADYFCQQYNRYPYTSGGGTKLEIKRAAAIEVMYPPPYLDNEKSNGTIIHVKGKHLCPSPLFPGPSKPFWVLVVVGGVLACYSLLVTVAFIIFWVRSKRSRLLHSDYMNMTPRRPGPTRKHYQPYAPPRDFAAYRSRVKFSRSVEPPAYQQGQNQLYNELNLGRREEYDVLDKRRGRDPEMGGKPRRKNPQEGLYNELQKDKMAEAYSEIGMKGERRRGKGHDGLYQGLSTATKDTYDALHMQALPPR

SEQ ID NO: 554 - protein, 467 aa, synthetic construct; identical to SEQ ID NO: 553
  source 1..467: note = vadacabtagene leraleucel, chain B

SEQ ID NO: 555 - protein, 479 aa, synthetic construct
  source 1..479: note = varnimcabtagene autoleucel, chain A
NIVLTQSPASLAVSLGQRATISCRASESVDNFGNSFMHWYQQKSGQPPRLLIYIASNLESGVPARFSGSGSRTDFTLTIDPVEADDAATYYCHQNNEDPLTFGAGTKLELKGGGGSGGGGSGGGGSGGGGSHSQIQLQQSGAELVRPGSSVKISCKASGFAFSSYWMNWVKQRPGQGLEWIGQIYPGDGDTKYNVKFRGKATLTADESSSTAYIQLTSLTSEDSGVYFCARKRITAVITTVFDVWGAGTTVTVSSTTTPAPRPPTPAPTIASQPLSLRPEACRPAAGGAVHTRGLDFACDIYIWAPLAGTCGVLLLSLVITLYCKRGRKKLLYIFKQPFMRPVQTTQEEDGCSCRFPEEEEGGCELRVKFSRSADAPAYQQGQNQLYNELNLGRREEYDVLDKRRGRDPEMGGKPQRRKNPQEGLYNELQKDKMAEAYSEIGMKGERRRGKGHDGLYQGLSTATKDTYDALHMQALPPR

SEQ ID NO: 556 - protein, 479 aa, synthetic construct; identical to SEQ ID NO: 555
  source 1..479: note = varnimcabtagene autoleucel, chain B

SEQ ID NO: 557 - protein, 487 aa, synthetic construct
  source 1..487: note = volamcabtagene durzigedleucel, chain A
QVQLVQSGAEVKKPGASVKVSCKASGYTFTNYGMNWVRQAPGQGLKWMGWINTYTGEPTYADAFKGRVTMTRDTSISTAYMELSRLRSDDTAVYYCARDYGDYGMDYWGQGTTVTVSSGGGGSGGGGSGGGGSGDIVMTQSPDSLAVSLGERATINCRASKSVSTSGYSFMHWYQQKPGQPPKLLIYLASNLESGVPDRFSGSGSGTDFTLTISSLQAEDVAVYYCQHSREVPWTFGQGTKVEIKSAAAFVPVFLPAKPTTTPAPRPPTPAPTIASQPLSLRPEACRPAAGGAVHTRGLDFACDIYIWAPLAGTCGVLLLSLVITLYCNHRNRKRGRKKLLYIFKQPFMRPVQTTQEEDGCSCRFPEEEEGGCELRVKFSRSADAPAYQQGQNQLYNELNLGRREEYDVLDKRRGRDPEMGGKPRRKNPQEGLYNELQKDKMAEAYSEIGMKGERRRGKGHDGLYQGLSTATKDTYDALHMQALPPR

SEQ ID NO: 558 - protein, 487 aa, synthetic construct; identical to SEQ ID NO: 557
  source 1..487: note = volamcabtagene durzigedleucel, chain B

SEQ ID NO: 559 - protein, 454 aa, synthetic construct
  source 1..454: note = zamtocabtagene autoleucel, chain A
EVQLQQSGAELVKPGASVKMSCKASGYTFTSYNMHWVKQTPGQGLEWIGAIYPGNGDTSYNQKFKGKATLTADKSSSTAYMQLSSLTSEDSADYYCARSNYYGSSYWFFDVWGAGTTVTVSSDIVLTQSPAILSASPGEKVTMTCRASSSVNYMDWYQKKPGSSPKPWIYATSNLASGVPARFSGSGSGTSYSLTISRVEAEDAATYYCQQWSFNPPTFGGGTKLEIKDIQMTQTTSSLSASLGDRVTISCRASQDISKYLNWYQQKPDGTVKLLIYHTSRLHSGVPSRFSGSGSGTDYSLTISNLEQEDIATYFCQQGNTLPYTFGGGTKLEIEVKLQESGPGLVAPSQSLSVTCTVSGVSLPDYGVSWIRQPPRKGLEWLGVIWGSETTYYNSALKSRLTIIKDNSKSQVFLKMNSLQTDDTAIYYCAKHYYYGGSYAMDYWGQGTSVTVSS

SEQ ID NO: 560 - protein, 454 aa, synthetic construct; identical to SEQ ID NO: 559
  source 1..454: note = zamtocabtagene autoleucel, chain B

SEQ ID NO: 561 - protein, 468 aa, synthetic construct
  source 1..468: note = zevorcabtagene autoleucel, chain A
EVQLLESGGGLVQPGGSLRLSCAASGFTFGGNAMSWVRQAPGKGLEWVSAISGNGGSTFYADSVKGRFTISRDNSKNTLYLQMNSLRAEDTAVYYCAKVRPFWGTFDYWGQGTLVTVSSGGGGSGGGGSGGGGSEIVLTQSPGTLSLSPGERATLSCRASQSVSSSYLAWYQQKPGQAPRLLIYGASSRATGIPDRFSGSGSGTDFTLTISRLEPEDFAVYYCQQYFNPPEYTFGQGTKVEIKRTTTPAPRPPTPAPTIASQPLSLRPEACRPAAGGAVHTRGLDFACDIYIWAPLAGTCGVLLLSLVITLYCKRGRKKLLYIFKQPFMRPVQTTQEEDGCSCRFPEEEEGGCELRVKFSRSADAPAYQQGQNQLYNELNLGRREEYDVLDKRRGRDPEMGGKPQRRKNPQEGLYNELQKDKMAEAYSEIGMKGERRRGKGHDGLYQGLSTATKDTYDALHMQALPPR

SEQ ID NO: 562 - protein, 468 aa, synthetic construct; identical to SEQ ID NO: 561
  source 1..468: note = zevorcabtagene autoleucel, chain B

SEQ ID NO: 563 - protein, 546 aa, synthetic construct
  source 1..546: note = afamitresgene autoleucel
KNQVEQSPQSLIILEGKNCTLQCNYTVSPFSNLRWYKQDTGRGPVSLTILTFSENTKSNGRYTATLDADTKQSSLHITASQLSDSASYICVVSGGTDSWGKLQFGAGTQVVVTPDIQNPDPAVYQLRDSKSSDKSVCLFTDFDSQTNVSQSKDSDVYITDKTVLDMRSMDFKSNSAVAWSNKSDFACANAFNNSIIPEDTFFPSPESSCDVKLVEKSFETDTNLNFQNLSVIGFRILLLKVAGFNLLMTLRLWSSGSRAKRSGSGATNFSLLKQAGDVEENPGPRMASLLFFCGAFYLLGTGSMDADVTQTPRNRITKTGKRIMLECSQTKGHDRMYWYRQDPGLGLRLIYYSFDVKDINKGEISDGYSVSRQAQAKFSLSLESAIPNQTALYFCATSGQGAYEEQFFGPGTRLTVLEDLKNVFPPEVAVFEPSEAEISHTQKATLVCLATGFYPDHVELSWWVNGKEVHSGVSTDPQPLKEQPALNDSRYCLSSRLRVSATFWQNPRNHFRCQVQFYGLSENDEWTQDRAKPVTQIVSAEAWGRA

SEQ ID NO: 564 - protein, 545 aa, synthetic construct
  source 1..545: note = besvatresgene autoleucel
KQEVTQIPAALSVPEGENLVLNCSFTDSAIYNLQWFRQDPGKGLTSLLLIQSSQREQTSGRLNASLDKSSGRSTLYIAASQPGDSATYLCAVRPLYGGSYIPTFGRGTSLIVHPYIQNPDPAVYQLRDSKSSDKSVCLFTDFDSQTNVSQSKDSDVYITDKTVLDMRSMDFKSNSAVAWSNKSDFACANAFNNSIIPEDTFFPSPESSCDVKLVEKSFETDTNLNFQNLSVIGFRILLLKVAGFNLLMTLRLWSSGSRAKRSGSGATNFSLLKQAGDVEENPGPRMSIGLLCCAALSLLWAGPVNAGVTQTPKFQVLKTGQSMTLQCAQDMNHEYMSWYRQDPGMGLRLIHYSVGAGITDQGEVPNGYNVSRSTTEDFPLRLLSAAPSQTSVYFCASSYVGNTGELFFGEGSRLTVLEDLKNVFPPEVAVFEPSEAEISHTQKATLVCLATGFYPDHVELSWWVNGKEVHSGVSTDPQPLKEQPALNDSRYCLSSRLRVSATFWQNPRNHFRCQVQFYGLSENDEWTQDRAKPVTQIVSAEAWGR

SEQ ID NO: 565 - protein, 546 aa, synthetic construct
  source 1..546: note = letetresgene autoleucel
KQEVTQIPAALSVPEGENLVLNCSFTDSAIYNLQWFRQDPGKGLTSLLLIQSSQREQTSGRLNASLDKSSGRSTLYIAASQPGDSATYLCAVRPLYGGSYIPTFGRGTSLIVHPYIQNPDPAVYQLRDSKSSDKSVCLFTDFDSQTNVSQSKDSDVYITDKTVLDMRSMDFKSNSAVAWSNKSDFACANAFNNSIIPEDTFFPSPESSCDVKLVEKSFETDTNLNFQNLSVIGFRILLLKVAGFNLLMTLRLWSSGSRAKRSGSGATNFSLLKQAGDVEENPGPRMSIGLLCCAALSLLWAGPVNAGVTQTPKFQVLKTGQSMTLQCAQDMNHEYMSWYRQDPGMGLRLIHYSVGAGITDQGEVPNGYNVSRSTTEDFPLRLLSAAPSQTSVYFCASSYVGNTGELFFGEGSRLTVLEDLKNVFPPEVAVFEPSEAEISHTQKATLVCLATGFYPDHVELSWWVNGKEVHSGVSTDPQPLKEQPALNDSRYCLSSRLRVSATFWQNPRNHFRCQVQFYGLSENDEWTQDRAKPVTQIVSAEAWGRA

SEQ ID NO: 566 - protein, 539 aa, synthetic construct
  source 1..539: note = mipetresgene autoleucel
NAGVTQTPKFQVLKTGQSMTLQCAQDMNHEYMSWYRQDPGMGLRLIHYSVAEGITDQGEVPNGYNVSRSTTEDFPLRLLSAAPSQTSVYFCASSYVGAAGELFFGEGSRLTVLEDLKNVFPPEVAVFEPSEAEISHTQKATLVCLATGFYPDHVELSWWVNGKEVHSGVSTDPQPLKEQPALNDSRYALSSRLRVSATFWQDPRNHFRCQVQFYGLSENDEWTQDRAKPVTQIVSAEAWGRADCGFTSESYQQGVLSATILYEILLGKATLYAVLVSALVLMAMVKRKDSRGSGSGATNFSLLKQAGDVEENPGPMETLLGLLILWLQLQWVSSKQEVTQIPAALSVPEGENLVLNCSFTDSAIYNLQWFRQDPGKGLTSLLLIQSSQREQTSGRLNASLDKSSGRSTLYIAASQPGDSATYLCAVRPQTGGSYIPTFGRGTSLIVHPYIQNPDPAVYQLRRSKSSDKSVCLFTDFDSQTNVSQSKDSDVYITDKTVLDMRSMDFKSNSAVAWSNKSDFACANAFNNSIIPEDTFFPSP

SEQ ID NO: 567 - protein, 540 aa, synthetic construct
  source 1..540: note = olitresgene autoleucel
QKEVEQNSGPLSVPEGAIASLNCTYSDRGSQSFFWYRQYSGKSPELIMSIYSNGDKEDGRFTAQLNKASQYVSLLIRDSQPSDSATYLCAVRGTGRRALTFGSGTRLQVQPNIQNPDPAVYQLRDSKSSDKSVCLFTDFDSQTNVSQSKDSDVYITDKTVLDMRSMDFKSNSAVAWSNKSDFACANAFNNSIIPEDTFFPSPESSCDVKLVEKSFETDTNLNFQNLSVIGFRILLLKVAGFNLLMTLRLWSSGSRAKRSGSGATNFSLLKQAGDVEENPGPRMSLGLLCCGVFSLLWAGPVNAGVTQTPKFRVLKTGQSMTLLCAQDMNHDYMYWYRQDPGMGLRLIHYSVGEGTTAKGEVPDGYNVSRLKKQNFLLGLESAAPSQTSVYFCASSFTDTQYFGPGTRLTVLEDLKNVFPPEVAVFEPSEAEISHTQKATLVCLATGFYPDHVELSWWVNGKEVHSGVSTDPQPLKEQPALNDSRYCLSSRLRVSATFWQNPRNHFRCQVQFYGLSENDEWTQDRAKPVTQIVSAEAWGRA

SEQ ID NO: 568 - protein, 546 aa, synthetic construct; identical to SEQ ID NO: 565
  source 1..546: note = suvutresgene autoleucel

SEQ ID NO: 569 - protein, 254 aa, synthetic construct
  source 1..254: note = tacatresgene autoleucel
LKNVFPPKVAVFEPSEAEISHTQKATLVCLATGFYPDHVELSWWVNGKEVHSGVSTDPQPLKEQPALNDSRYCLSSRLRVSATFWQNPRNHFRCQVQFYGLSENDEWTQDRAKPVTQIVSAEAWGRADCGFTSESYQQGVLSATILYEILLGKATLYAVLVSALVLMAMVSRERIPEARAKRGSGATNFSLLKQAGDVEENPGPMATGSRTSLLLAFGLLCLPWLQEGSAIQNPDPAVYQLRDSKSSDKSVCLF

SEQ ID NO: 570 - protein, 465 aa, synthetic construct; identical to SEQ ID NO: 545
  source 1..465: note = tisagenlecleucel

SEQ ID NO: 571 - DNA, 22 bp, synthetic construct
  source 1..22: mol_type = other DNA; note = 1018 ISS
tgactgtgaacgttcgagatga

SEQ ID NO: 572 - RNA, 19 nt, synthetic construct
  source 1..19: mol_type = other RNA; note = AEG35156
tgcaccctggataccattt

SEQ ID NO: 573 - DNA, 20 bp, synthetic construct
  source 1..20: mol_type = other DNA; note = abetimus, subunit 1
gtgtgtgtgtgtgtgtgtgt

SEQ ID NO: 574 - DNA, 20 bp, synthetic construct
  source 1..20: mol_type = other DNA; note = abetimus, subunit 2
cacacacacacacacacaca

SEQ ID NO: 575 - DNA, 20 bp, synthetic construct
  source 1..20: mol_type = other DNA; note = abetimus, subunit 3
cacacacacacacacacaca

SEQ ID NO: 576 - DNA, 20 bp, synthetic construct
  source 1..20: mol_type = other DNA; note = abetimus, subunit 4
cacacacacacacacacaca

SEQ ID NO: 577 - DNA, 20 bp, synthetic construct
  source 1..20: mol_type = other DNA; note = abetimus, subunit 5
cacacacacacacacacaca

SEQ ID NO: 578 - DNA, 20 bp, synthetic construct
  source 1..20: mol_type = other DNA; note = abetimus, subunit 6
gtgtgtgtgtgtgtgtgtgt

SEQ ID NO: 579 - DNA, 20 bp, synthetic construct
  source 1..20: mol_type = other DNA; note = abetimus, subunit 7
gtgtgtgtgtgtgtgtgtgt

SEQ ID NO: 580 - DNA, 20 bp, synthetic construct
  source 1..20: mol_type = other DNA; note = abetimus, subunit 8
gtgtgtgtgtgtgtgtgtgt

SEQ ID NO: 581 - DNA, 20 bp, synthetic construct
  source 1..20: mol_type = other DNA; note = afovirsen
ttgcttccatcttcctcgtc

SEQ ID NO: 582 - DNA, 25 bp, synthetic construct
  source 1..25: mol_type = other DNA; note = aganirsen
tatccggagggctcgccatgctgct

SEQ ID NO: 583 - DNA, 24 bp, synthetic construct
  source 1..24: mol_type = other DNA; note = agatolimod
tcgtcgttttgtcgttttgtcgtt

SEQ ID NO: 584 - DNA, 20 bp, synthetic construct
  source 1..20: mol_type = other DNA; note = alicaforsen
gcccaagctggcatccgtca

SEQ ID NO: 585 - DNA, 26 bp, synthetic construct
  source 1..26: mol_type = other DNA; note = AGR0100
ggtggtggtggttgtggtggtggtgg

SEQ ID NO: 586 - DNA, 20 bp, synthetic construct
  source 1..20: mol_type = other DNA; note = amlivirsen
gcagaggtgaagcgaagtgc

SEQ ID NO: 587 - RNA, 31 nt, synthetic construct
  source 1..31: mol_type = other RNA; note = pegnivacogin
gtggactataccgcgtaatgctgcctccact

SEQ ID NO: 588 - RNA, 15 nt, synthetic construct
  source 1..15: mol_type = other RNA; note = anivamersen
cgcggtatagtccac

SEQ ID NO: 589 - DNA, 20 bp, synthetic construct
  source 1..20: mol_type = other DNA; note = apatorsen
gggacgcggcgctcggtcat

SEQ ID NO: 590 - DNA, 26 bp, synthetic construct
  source 1..26: mol_type = other DNA; note = aprinocarsen
ggtggtggtggttgtggtggtggtgg

SEQ ID NO: 591 - DNA, 17 bp, synthetic construct
  source 1..17: mol_type = other DNA; note = AR-177
gtggtgggtgggtgggt

SEQ ID NO: 592 - RNA, 32 nt, synthetic construct
  source 1..32: mol_type = other RNA; note = ARC19499
ggaatatacttggctcgttaggtgcgtatata

SEQ ID NO: 593 - DNA, 20 bp, synthetic construct
  source 1..20: mol_type = other DNA; note = archexin
gctgcatgatctccttggcg

SEQ ID NO: 594 - RNA, 21 nt, synthetic construct
  source 1..21: mol_type = other RNA; note = asvasiran, antisense
cttgactttgctaagagcctt

SEQ ID NO: 595 - RNA, 21 nt, synthetic construct
  source 1..21: mol_type = other RNA; note = asvasiran, sense
ggctcttagcaaagtcaagtt

SEQ ID NO: 596 - RNA, 20 nt, synthetic construct
  source 1..20: mol_type = other RNA; note = atesidorsen
tcagggcattctttccattc

SEQ ID NO: 597 - RNA, 23 nt, synthetic construct
  source 1..23: mol_type = other RNA; note = ATU-027 , antisense
agacttgaggacttcctggacaa

SEQ ID NO: 598 - RNA, 23 nt, synthetic construct
  source 1..23: mol_type = other RNA; note = ATU-027 , sense
ttgtccaggaagtcctcaagtct

SEQ ID NO: 599 - RNA, 39 nt, synthetic construct
  source 1..39: mol_type = other RNA; note = avacincaptad
cgccgcggtctcaggcgctgagtctgagtttacctgcgt

SEQ ID NO: 600 - DNA, 19 bp, synthetic construct
  source 1..19: mol_type = other DNA; note = AVI-7537
gccatggttttttctcagg

SEQ ID NO: 601 - DNA, 16 bp, synthetic construct
  source 1..16: mol_type = other DNA; note = baliforsen
tcccgaatgtccgaca

SEQ ID NO: 602 - RNA, 20 nt, synthetic construct
  source 1..20: mol_type = other RNA; note = bamosiran, antisense
cattgtgcatgtgatccagt

SEQ ID NO: 603 - RNA, 21 nt, synthetic construct
  source 1..21: mol_type = other RNA; note = bamosiran, sense
ctggatcacatgcacaatgtt

SEQ ID NO: 604 - RNA, 18 nt, synthetic construct
  source 1..18: mol_type = other RNA; note = bazlitoran
ctatctgtcgttctctgt

SEQ ID NO: 605 - RNA, 16 nt, synthetic construct
  source 1..16: mol_type = other RNA; note = beclanorsen
ctcccaacgtgcgcca

SEQ ID NO: 606 - DNA, 20 bp, synthetic construct
  source 1..20: mol_type = other DNA; note = bepirovirsen
gcagaggtgaagcgaagtgc

SEQ ID NO: 607 - RNA, 21 nt, synthetic construct
  source 1..21: mol_type = other RNA; note = bevasiranib, antisense
acctcaccaaggccagcactt

SEQ ID NO: 608 - RNA, 21 nt, synthetic construct
  source 1..21: mol_type = other RNA; note = bevasiranib, sense
gtgctggccttggtgaggttt

SEQ ID NO: 609 - DNA, 23 bp, synthetic construct
  source 1..23: mol_type = other DNA; note = brivoligide, chain 1
ctacgcccaccgcccacgcatac

SEQ ID NO: 610 - DNA, 23 bp, synthetic construct
  source 1..23: mol_type = other DNA; note = brivoligide, chain 2
gtatgcgtgggcggtgggcgtag

SEQ ID NO: 611 - DNA, 22 bp, synthetic construct
  source 1..22: mol_type = other DNA; note = casimersen
caatgccatcctggagttcctg

SEQ ID NO: 612 - DNA, 24 bp, synthetic construct
  source 1..24: mol_type = other DNA; note = cavrotolimod
tcgtcgttttgtcgttttgtcgtt

SEQ ID NO: 613 - RNA, 25 nt, synthetic construct
  source 1..25: mol_type = other RNA; note = cemdisiran, antisense
tattataaaaatatcttgctttttt

SEQ ID NO: 614 - RNA, 22 nt, synthetic construct
  source 1..22: mol_type = other RNA; note = cemdisiran, sense
aagcaagatatttttataatan

SEQ ID NO: 615 - DNA, 20 bp, synthetic construct
  source 1..20: mol_type = other DNA; note = cenersen
ccctgctcccccctggctcc

SEQ ID NO: 616 - DNA, 19 bp, synthetic construct
  source 1..19: mol_type = other DNA; note = cobitolimod
ggaacagttcgtccatggc

SEQ ID NO: 617 - DNA, 30 bp, synthetic construct
  source 1..30: mol_type = other DNA; note = CODA-001
gtaattgcggcaagaagaattgtttctgtc

SEQ ID NO: 618 - RNA, 16 nt, synthetic construct
  source 1..16: mol_type = other RNA; note = cofirasersen
cccgatagctggttgt

SEQ ID NO: 619 - RNA, 19 nt, synthetic construct
  source 1..19: mol_type = other RNA; note = cosdosiran, antisense
gccagaatgtggaactcct

SEQ ID NO: 620 - RNA, 19 nt, synthetic construct
  source 1..19: mol_type = other RNA; note = cosdosiran, sense
aggagttccacattctggc

SEQ ID NO: 621 - DNA, 21 bp, synthetic construct
  source 1..21: mol_type = other DNA; note = CPG-8954
gggggggtgtcgcagcagggg

SEQ ID NO: 622 - DNA, 20 bp, synthetic construct
  source 1..20: mol_type = other DNA; note = cupabimod, chain 1
ggagggaaatcccttcaagg

SEQ ID NO: 623 - DNA, 20 bp, synthetic construct
  source 1..20: mol_type = other DNA; note = cupabimod, chain 2
ccttgaagggatttccctcc

SEQ ID NO: 624 - RNA, 21 nt, synthetic construct
  source 1..21: mol_type = other RNA; note = custirsen
cagcagcagagtcttcatcat

SEQ ID NO: 625 - RNA, 16 nt, synthetic construct
  source 1..16: mol_type = other RNA; note = danvatirsen
ctatttggatgtcagc

SEQ ID NO: 626 - RNA, 21 nt, synthetic construct
  source 1..21: mol_type = other RNA; note = daplusiran, antisense
gtggacttctctcaattttct

SEQ ID NO: 627 - RNA, 21 nt, synthetic construct
  source 1..21: mol_type = other RNA; note = daplusiran, sense
agaaaattgagagaagtccac

SEQ ID NO: 628 - RNA, 25 nt, synthetic construct
  source 1..25: mol_type = other RNA; note = dematirsen
gttgcctccggttctgaaggtgttc

SEQ ID NO: 629 - DNA, 20 bp, synthetic construct
  source 1..20: mol_type = other DNA; note = donidalorsen
tgcaagtctcttggcaaaca

SEQ ID NO: 630 - RNA, 20 nt, synthetic construct
  source 1..20: mol_type = other RNA; note = drisapersen
tcaaggaagatggcatttct

SEQ ID NO: 631 - DNA, 14 bp, synthetic construct
  source 1..14: mol_type = other DNA; note = edifoligide, chain 1
ctagatttcccgcg

SEQ ID NO: 632 - DNA, 14 bp, synthetic construct
  source 1..14: mol_type = other DNA; note = edifoligide, chain 2
gatccgcgggaaat

SEQ ID NO: 633 - RNA, 40 nt, synthetic construct
  source 1..40: mol_type = other RNA; note = egaptivon pegol
gcgtgcagtgccttcggccgtgcggtgcctccgtcacgct

SEQ ID NO: 634 - DNA, 20 bp, synthetic construct
  source 1..20: mol_type = other DNA; note = EIF-4E ASO
tgttatattcctggatcctt

SEQ ID NO: 635 - RNA, 33 nt, synthetic construct
  source 1..33: mol_type = other RNA; note = eluforsen
atcataggaaacaccaaagatgatattttcttt

SEQ ID NO: 636 - RNA, 40 nt, synthetic construct
  source 1..40: mol_type = other RNA; note = emapticap pegol
gcacgtccctcaccggtgcaagtgaagccgtggctctgcg

SEQ ID NO: 637 - RNA, 20 nt, synthetic construct
  source 1..20: mol_type = other RNA; note = eplontersen
tcttggttacatgaaatccc

SEQ ID NO: 638 - DNA, 30 bp, synthetic construct
  source 1..30: mol_type = other DNA; note = eteplirsen
ctccaacatcaaggaagatggcatttctag

SEQ ID NO: 639 - RNA, 20 nt, synthetic construct
  source 1..20: mol_type = other RNA; note = fesomersen
acggcattggtgcacagttt

SEQ ID NO: 640 - RNA, 23 nt, synthetic construct
  source 1..23: mol_type = other RNA; note = fitusiran, antisense
ttgaagtaaatggtgttaaccag

SEQ ID NO: 641 - RNA, 21 nt, synthetic construct
  source 1..21: mol_type = other RNA; note = fitusiran, sense
ggttaacaccatttacttcaa

SEQ ID NO: 642 - DNA, 21 bp, synthetic construct
  source 1..21: mol_type = other DNA; note = fomivirsen
gcgtttgctcttcttcttgcg

SEQ ID NO: 643 - DNA, 18 bp, synthetic construct
  source 1..18: mol_type = other DNA; note = gataparsen
tgtgctattctgtgaatt

SEQ ID NO: 644 - RNA, 23 nt, synthetic construct
  source 1..23: mol_type = other RNA; note = givosiran, antisense
aatgatgagacactctttctggt

SEQ ID NO: 645 - RNA, 21 nt, synthetic construct
  source 1..21: mol_type = other RNA; note = givosiran, sense
cagaaagagtgtctcatctta

SEQ ID NO: 646 - DNA, 21 bp, synthetic construct
  source 1..21: mol_type = other DNA; note = GNKG-168
tcgtcgacgtcgttcgttctc

SEQ ID NO: 647 - DNA, 25 bp, synthetic construct
  source 1..25: mol_type = other DNA; note = golodirsen
gttgcctccggttctgaaggtgttc

SEQ ID NO: 648 - DNA, 20 bp, synthetic construct
  source 1..20: mol_type = other DNA; note = GPI-2A
ggttcttttggtccttgtct

SEQ ID NO: 649 - DNA, 20 bp, synthetic construct
  source 1..20: mol_type = other DNA; note = GTI-2040
ggctaaatcgctccaccaag

SEQ ID NO: 650 - DNA, 20 bp, synthetic construct
  source 1..20: mol_type = other DNA; note = GTI-2501
ctctagcgtcttaaagccga

SEQ ID NO: 651 - DNA, 24 bp, synthetic construct
  source 1..24: mol_type = other DNA; note = IMT-504
tcatcattttgtcattttgtcatt

SEQ ID NO: 652 - RNA, 22 nt, synthetic construct
  source 1..22: mol_type = other RNA; note = inclisiran, antisense
ctagacctgttttgcttttgtn

SEQ ID NO: 653 - RNA, 23 nt, synthetic construct
  source 1..23: mol_type = other RNA; note = inclisiran, sense
acaaaagcaaaacaggtctagaa

SEQ ID NO: 654 - RNA, 20 nt, synthetic construct
  source 1..20: mol_type = other RNA; note = inotersen
tcttggttacatgaaatccc

SEQ ID NO: 655 - DNA, 13 bp, synthetic construct
  source 1..13: mol_type = other DNA; note = imetelstat
tagggttagacaa

SEQ ID NO: 656 - RNA, 19 nt, synthetic construct
  source 1..19: mol_type = other RNA; note = lademirsen
acatcagtctgataagcta

SEQ ID NO: 657 - RNA, 44 nt, synthetic construct
  source 1..44: mol_type = other RNA; note = lexaptepid pegol
gcgccgtatgggattaagtaaatgaggagttggaggaagggcgc

SEQ ID NO: 658 - DNA, 26 bp, synthetic construct
  source 1..26: mol_type = other DNA; note = litenimod
taaacgttataacgttatgacgtcat

SEQ ID NO: 659 - RNA, 21 nt, synthetic construct
  source 1..21: mol_type = other RNA; note = lumasiran, antisense
gactttcatcctggaaatata

SEQ ID NO: 660 - RNA, 23 nt, synthetic construct
  source 1..23: mol_type = other RNA; note = lumasiran, sense
tatatttccaggatgaaagtcca

SEQ ID NO: 661 - RNA, 20 nt, synthetic construct
  source 1..20: mol_type = other RNA; note = mipomersen
gcctcagtctgcttcgcacc

SEQ ID NO: 662 - DNA, 15 bp, synthetic construct
  source 1..15: mol_type = other DNA; note = miravirsen
ccattgtcacactcc

SEQ ID NO: 663 - DNA, 21 bp, synthetic construct
  source 1..21: mol_type = other DNA; note = mongersen
gtcgccccttctccccgcagc

SEQ ID NO: 664 - RNA, 22 nt, synthetic construct
  source 1..22: mol_type = other RNA; note = nedosiran, antisense
tcagataaaaaggacaacatgg

SEQ ID NO: 665 - RNA, 36 nt, synthetic construct
  source 1..36: mol_type = other RNA; note = nedosiran, sense
atgttgtcctttttatctgagcagccgaaaggctgc

SEQ ID NO: 666 - DNA, 18 bp, synthetic construct
  source 1..18: mol_type = other DNA; note = nusinersen
tcacctttataatgctgg

SEQ ID NO: 667 - DNA, 18 bp, synthetic construct
  source 1..18: mol_type = other DNA; note = oblimersen
tctcccagcgtgcgccat

SEQ ID NO: 668 - RNA, 45 nt, synthetic construct
  source 1..45: mol_type = other RNA; note = olaptesed pegol
gcgtggtgtgatctagatgtattggctgatcctagtcaggtacgc

SEQ ID NO: 669 - RNA, 21 nt, synthetic construct
  source 1..21: mol_type = other RNA; note = olpasiran, antisense
cagccccttattgttatacga

SEQ ID NO: 670 - RNA, 21 nt, synthetic construct
  source 1..21: mol_type = other RNA; note = olpasiran, sense
tcgtataacaataaggggctg

SEQ ID NO: 671 - RNA, 21 nt, synthetic construct
  source 1..21: mol_type = other RNA; note = patisiran, antisense
gtaaccaagagtattccattt

SEQ ID NO: 672 - RNA, 21 nt, synthetic construct
  source 1..21: mol_type = other RNA; note = patisiran, sense
atggaatactcttggttactt

SEQ ID NO: 673 - RNA, 28 nt, synthetic construct
  source 1..28: mol_type = other RNA; note = pegaptanib
cggaatcagtgaatgcttatacatccgt

SEQ ID NO: 674 - RNA, 30 nt, synthetic construct
  source 1..30: mol_type = other RNA; note = pegpleranib
caggctacgcgtagagcatcatgatcctgt

SEQ ID NO: 675 - DNA, 20 bp, synthetic construct
  source 1..20: mol_type = other DNA; note = pelacarsen
tgctccgttggtgcttgttc

SEQ ID NO: 676 - DNA, 18 bp, synthetic construct
  source 1..18: mol_type = other DNA; note = prexigebersen
atatttggcgatggcttc

SEQ ID NO: 677 - DNA, 30 bp, synthetic construct; identical to SEQ ID NO: 638
  source 1..30: mol_type = other DNA; note = radavirsen

SEQ ID NO: 678 - RNA, 25 nt, synthetic construct
  source 1..25: mol_type = other RNA; note = remlarsen, antisense
tagcaccatttgaaatcagtgtttt

SEQ ID NO: 679 - RNA, 23 nt, synthetic construct
  source 1..23: mol_type = other RNA; note = remlarsen, sense
aacactgtttacaaatggtccta

SEQ ID NO: 680 - RNA, 18 nt, synthetic construct
  source 1..18: mol_type = other RNA; note = renadirsen
cctaccgtaacccgtcgc

SEQ ID NO: 681 - DNA, 20 bp, synthetic construct
  source 1..20: mol_type = other DNA; note = AVI-4126
acgttgaggggcatcgtcgc

SEQ ID NO: 682 - RNA, 21 nt, synthetic construct
  source 1..21: mol_type = other RNA; note = revusiran, antisense
tgggatttcatgtaaccaaga

SEQ ID NO: 683 - RNA, 23 nt, synthetic construct
  source 1..23: mol_type = other RNA; note = revusiran, sense
tcttggttacatgaaatcccatc

SEQ ID NO: 684 - skipped

SEQ ID NO: 685 - RNA, 20 nt, synthetic construct
  source 1..20: mol_type = other RNA; note = rimigorsen
tcagcttctgttagccactg

SEQ ID NO: 686 - DNA, 24 bp, synthetic construct
  source 1..24: mol_type = other DNA; note = rosomidnar
cacgcacgcgcatccccgcccgtg

SEQ ID NO: 687 - RNA, 20 nt, synthetic construct
  source 1..20: mol_type = other RNA; note = suvodirsen
tcaaggaagatggcatttct

SEQ ID NO: 688 - RNA, 19 nt, synthetic construct
  source 1..19: mol_type = other RNA; note = temavirsen
acaccattgtcacactcca

SEQ ID NO: 689 - RNA, 19 nt, synthetic construct
  source 1..19: mol_type = other RNA; note = teprasiran, antisense
tgaagggtgaaatattctc

SEQ ID NO: 690 - RNA, 19 nt, synthetic construct
  source 1..19: mol_type = other RNA; note = teprasiran, sense
gagaatatttcacccttca

SEQ ID NO: 691 - RNA, 19 nt, synthetic construct
  source 1..19: mol_type = other RNA; note = tivanisiran, antisense
aagcgcatcttctacttca

SEQ ID NO: 692 - RNA, 19 nt, synthetic construct
  source 1..19: mol_type = other RNA; note = tivanisiran, sense
tgaagtagaagatgcgctt

SEQ ID NO: 693 - RNA, 20 nt, synthetic construct
  source 1..20: mol_type = other RNA; note = tofersen
caggatacatttctacagct

SEQ ID NO: 694 - RNA, 20 nt, synthetic construct
  source 1..20: mol_type = other RNA; note = tominersen
ctcagtaacattgacaccac

SEQ ID NO: 695 - DNA, 18 bp, synthetic construct
  source 1..18: mol_type = other DNA; note = trabedersen
cggcatgtctattttgta

SEQ ID NO: 696 - DNA, 25 bp, synthetic construct
  source 1..25: mol_type = other DNA; note = trecovirsen
tcttcctctctctacccacgctctc

SEQ ID NO: 697 - DNA, 30 bp, synthetic construct
  source 1..30: mol_type = other DNA; note = vidutolimod
gggggggggggacgatcgtcgggggggggg

SEQ ID NO: 698 - DNA, 21 bp, synthetic construct
  source 1..21: mol_type = other DNA; note = viltolarsen
cctccggttctgaaggtgttc

SEQ ID NO: 699 - RNA, 20 nt, synthetic construct
  source 1..20: mol_type = other RNA; note = volanesorsen
agcttcttgtccagctttat

SEQ ID NO: 700 - DNA, 20 bp, synthetic construct
  source 1..20: mol_type = other DNA; note = vupanorsen
ggacattgccagtaatcgca

SEQ ID NO: 701 - RNA, 21 nt, synthetic construct
  source 1..21: mol_type = other RNA; note = vutrisiran, antisense
tgggatttcatgtaaccaaga

SEQ ID NO: 702 - RNA, 23 nt, synthetic construct
  source 1..23: mol_type = other RNA; note = vutrisiran, sense
tcttggttacatgaaatcccatc

SEQ ID NO: 703 - RNA, 20 nt, synthetic construct
  source 1..20: mol_type = other RNA; note = rovanersen
ggcacaagggcacagacttc

SEQ ID NO: 704 - RNA, 20 nt, synthetic construct
  source 1..20: mol_type = other RNA; note = lexanersen
gtgcacacagtagatgaggg

SEQ ID NO: 705 - DNA, 16 bp, synthetic construct
  source 1..16: mol_type = other DNA; note = cepadacursen
aatgctacaaaaccca

SEQ ID NO: 706 - DNA, 16 bp, synthetic construct
  source 1..16: mol_type = other DNA; note = ISIS-863633
aataatctcatgtcag

SEQ ID NO: 707 - DNA, 26 bp, synthetic construct
  source 1..26: mol_type = other DNA; note = AS1411
ggtggtggtggttgtggtggtggtgg

SEQ ID NO: 708 - RNA, 22 nt, synthetic construct
  source 1..22: mol_type = other RNA; note = belcesiran, antisense
tttaagaagacaaagggtttgg

SEQ ID NO: 709 - RNA, 36 nt, synthetic construct
  source 1..36: mol_type = other RNA; note = belcesiran, sense
aaaccctttgtcttcttaaagcagccgaaaggctgc

SEQ ID NO: 710 - DNA, 20 bp, synthetic construct
  source 1..20: mol_type = other DNA; note = cimderlirsen
ccacctttgggtgaatagca

SEQ ID NO: 711 - RNA, 16 nt, synthetic construct
  source 1..16: mol_type = other RNA; note = frenlosirsen
agttgtaaatgagtcg

SEQ ID NO: 712 - RNA, 20 nt, synthetic construct
  source 1..20: mol_type = other RNA; note = LSP-GR3
gctaggtttacgggacctct

SEQ ID NO: 713 - DNA, 20 bp, synthetic construct
  source 1..20: mol_type = other DNA; note = monarsen
ctgcgatattttcttgtacc

SEQ ID NO: 714 - RNA, 20 nt, synthetic construct
  source 1..20: mol_type = other RNA; note = olezarsen
agcttcttgtccagctttat

SEQ ID NO: 715 - DNA, 25 bp, synthetic construct
  source 1..25: mol_type = other DNA; note = PUL-042
tcgtcgtcgttcgaacgacgttgat

SEQ ID NO: 716 - RNA, 20 nt, synthetic construct
  source 1..20: mol_type = other RNA; note = sapablursen
ctttattccaaagggcagct

SEQ ID NO: 717 - RNA, 17 nt, synthetic construct
  source 1..17: mol_type = other RNA; note = sepofarsen
ggtggatcacgagttca

SEQ ID NO: 718 - RNA, 18 nt, synthetic construct
  source 1..18: mol_type = other RNA; note = tadnersen
gcccctagcgcgcgactc

SEQ ID NO: 719 - DNA, 11 bp, synthetic construct
  source 1..11: mol_type = other DNA; note = tilsotolimod, chain 1
tcgaacgttcg

SEQ ID NO: 720 - DNA, 11 bp, synthetic construct
  source 1..11: mol_type = other DNA; note = tilsotolimod, chain 2
tcgaacgttcg

SEQ ID NO: 721 - RNA, 21 nt, synthetic construct
  source 1..21: mol_type = other RNA; note = tomligisiran, chain 1
taccaatttatgcctacagcg

SEQ ID NO: 722 - RNA, 21 nt, synthetic construct
  source 1..21: mol_type = other RNA; note = tomligisiran, chain 2
cgctgtaggcataaattggta

SEQ ID NO: 723 - DNA, 21 bp, synthetic construct
  source 1..21: mol_type = other DNA; note = TOP-1731
tcatgagtggcagctgcaatt

SEQ ID NO: 724 - RNA, 25 nt, synthetic construct
  source 1..25: mol_type = other RNA; note = varodarsen
tttgccgctgcccaatgccatcctg

SEQ ID NO: 725 - DNA, 21 bp, synthetic construct
  source 1..21: mol_type = other DNA; note = VEGLIN 3
tggcttgaagatgtactcgat

SEQ ID NO: 726 - RNA, 23 nt, synthetic construct
  source 1..23: mol_type = other RNA; note = zilebesiran, antisense
tgtactctcattgtggatgacga

SEQ ID NO: 727 - RNA, 21 nt, synthetic construct
  source 1..21: mol_type = other RNA; note = zilebesiran, sense
gtcatccacaatgagagtaca

SEQ ID NO: 728 - DNA, 20 bp, synthetic construct
  source 1..20: mol_type = other DNA; note = EGFP forward primer
cactacctgagcacccagtc

SEQ ID NO: 729 - DNA, 20 bp, synthetic construct
  source 1..20: mol_type = other DNA; note = EGFP reverse primer
tacagctcatccatgccgag

SEQ ID NO: 730 - DNA, 20 bp, synthetic construct
  source 1..20: mol_type = other DNA; note = GAPDH forward primer
ggagtcaacggatttggtcg

SEQ ID NO: 731 - DNA, 20 bp, synthetic construct
  source 1..20: mol_type = other DNA; note = GAPDH reverse primer
gacggtgccatggaatttgc

SEQ ID NO: 732 - DNA, 161 bp, synthetic construct
  source 1..161: mol_type = other DNA; note = ITR Consensus sequences
nsamcyysrrtgagggagttgsccactccctctmtgcgcrctcgctcrctcrstsgsgcckgsvgaccaaaggtcbscmgacksmmgdgstytschckksmggcscsasygagygagcgagygcgcakagagggagtggscaactccatcayywrrgktwn
